United States Patent Application Publication US 2008/0039413 A1 - sequence listing, part 25

SEQ ID NO: 3300 - DNA, 258303 bp, Mus musculus
  misc_feature (1)...(258303): n = A, C, G, or T/U
cggatggggcggcgagcaggaagactgtgcacgtaggagatgtctggagcccgccgccccggcacgtccaaggtacgctgtgctgttgctatgaaagcagagggcgggcgtgtaacctctgtgggcttctcgtgcctgtccctggtccggtgaagggagctggtgcgcccagtctgaccggcacgagcccgttggtggcggtcggtctaggcagggttccctcgctctgcctctgcccaggtctgctgaatggtcctgggaaccaagcgggtgggtggctgacagggaggacgaattgattcggagtgagtgtgagctggcgtctggcagttcatttgcctccgttttattttgttgcttaacacaccaagacagtagtgggtattggagtatctcttctgtcccaggcatcttttgctacactttgctttcccgcctaaactttctgagaggcgtgcttctcccgtgtctcccgcagtccctgtatactgtaggcactgttgtaggaactgttacatggatgaaatttaagcgatcctctacatttctccgacattgtgtttctcttggatcatattttgccttttcaaagttcctcacttacagatgattatttcataatactcaaaatttagaacagcaaacggtgcttcattccctcacctgctcttcctttcactaaatgctaaactcccttaacactaccattcgtacttatttctcagatagccttgaaagatgacactgtgaactttgtaacttatttagagagtaaaagcacgtataacttatgatttaaaagactaatttaaatttcaggaagactaaaagatgaaaaaatcaaggaattaaaacatttctacatctaacataaattagttcttgcagccctcgatacccttgctaactgtatacatttatttaagcgtccctaaagtcctgattcactcttatagctgctcattcacttctcctaactgcccagctccaaattttgactttgtgcctattctcaacaacttttttttttttttttttttcgagacaaggtttctctgtgtagaccaggctggccttgaactcagaaatcctcctgcctctgcctcccgagttctgggattaaaggcgtgcgccaccacgcccggcttcttttcttttcttttcttttcttttcttttcttttcttttcttttcttttcttttcttttcttttcttttcttttctttctttctttcttcttcttcttcttcttcttcttctttttttttttttttttttttttggttttttgagacagggtttctctgtatagccctggctgacctggaactcactttgtagaccaggctggcctagaactcaaaaatccgcctgcctctgcctcccaagtgctgggattaaaggcatgcgccaccatgcccggcgccttttcacaactttaagagtttgccctggactgcgatttttagctgtcactacagcataaagaaattacagtgtgttatgaaaccatttgtttagcttatcagggccctagcaatttttcctaacttagaaatctgttgtttttgttatttctttctgccctcttcattttattagtttccaatagcttttcttttcagtagttgtgttacttaactgttatgtaaagattgtctcaaaagtgaagcagctttccacaagtattgctatcaggattctgactgtagtttaagcttatggttgtagcttctcccaagacttctccagagaagtcttctcccaaattcactgaggtaggggccagggtggtggtggttgtggtaagtttcagtttgttagttccataggatggctcacaactttgtcaacagcaaatgagacaggatctcatgtcacacaggccgactctgaattactcatctttgatctacatttcaatttctaggattacaagtagcatatgccaccacacctgactttcatttaattaattaactggttggctaattaatttgcttttggtggagggagcagggcttatggcaggttatgtatacttagtgttttaactacatcgttatgccttggaatagtttctttactggacttgtgtttcatgctctgttcgtttcttttgtctgagtgtgtttttccttagtttggagaagatcttgtggtctatggcattcacctgggattcttcttccgcatctattacaattatttgaaagcttgatcttttcattgtatcccagatttcttggtgtattcctttcctgtgagttaaaaaattcatactctttgctttttggggggtttagagtccctactttgtcttccagtcccgatcttctgtcctctgtttgattcatttctacttgttaggctttcctttgagttttccagttatgttattgaaatttcagtttatcttcacttcagtttgagggacctacaatgtttttgtgtccttattgaatccagttttctttctggttctggcatttaattactgagtattgagtattataactatgttttgccttgtactgaaatgccagctattggtagtttcccctttttggactccttccagatatcccctacctctttgctctttcccagaaccactccctcttcatttcatcttcagaaaggagcaggcctccaagaggtaacagtcaaacaggacaagacaggattaaaaaagacaagatgaaagccctcgtatagaggctggacaaggaaacaataggaagaaaagagttccaagcataggcaaaagagtcagagacacacctgctcccattgttaggagtcccacaaacccatgaagctaacagccataacatatatgcagagaacctgctgcagacccatgaaggccccatgcttgctgtttcagtctctgtgagtttatgtgaatcttacttagttgggtcatgttctcctggtgtcctctgtcccctctgacttccacaatctttcctctcccttttctactgggttcccagatctcctatgggagggacccgatggagacctccaatttagactctttctgaataatgtctggtcctgggtctctgcacccgcttacatctgctgccagaggaagcctcgctgagaatgactggtaagacattgatctgtaaatatagcagaatatcattaatgatcatttaggtgttttgttttgttttttgttttgttttgttttttgtccagttatatttggttctaccctagatctcagagctctccagtctctggttcttggccattcaggcagtttaggtcatggcctctatcttgtggcatgagtctcaagttaaaccaaacattgtttggccactcccacaaattctgcgcatcttgcagggcaggataggttccagctttctcttttggtagcctgcaaagtaccttcctataccaaagagactagaacataggggcgaaaactccatacaggcaccagctggacctctccaggttcaatgagctgtgtagatgtcctcagcaattgggcctcactgttggttttcagagagcaaccgtctatcatcctgggttgtttaggaaactccaagggaaccccttgaccaacaactcaactgaatgcaacccagttccaccagtggaagccttgtctagctacaaaaaatggctagttcagactctattttccattcctaggagtcttcattaggttcaccctcagagatttcaggaagtttacactatacaaggtttttgtaccactttcctagtattctgtacttttttggctaatattcacttattagtgagtacataccgttcatgtccttttgtgtctgagtcacctcatttaggatattttctagttccatttgcctgcaaaactcatgatgcccttgtttttaatagctgagtagtattccatcatgtaagtgaaccatattttctgtatccattctacagttatgggacatctgggttgtttccagcttctggctatcacaaataagactgctatgaacatattgaaacatgtgcccctgtggcattgtggggcatattctgggtatatgcccaagagtggtataattgggtctttaggtagatatatttccaattttcagaggaacctccagattgatttccagagtggaactagtttgaaatcccaccagcaatggaggagtgtttctctacattcttgtcaacatgtgctgccacctgagtttttgattttagccaatctgattgataggtagaatctcagggtcatgttaattttcatttccctgatcactaaggactttgagcaagtgcttctcatccattcgagattcgtctgttgtgaattctctgtttagctctatatcccatttttttgattggattgtttcatgttttttggaggttagcttcataagttctgtatatattttggatattagccctgtattggatgtggggttagtgaagttttttttttcccccaatctgtaggttgccgatttgtcctattgactatgtcctttgccttatataagcttttcagtttcatgaggtcccaattatcaattcttgatcttagggcctaagccattggagttatgtttaggaaatttctcccccttccccctgcctccctgtgccactgagttcagggctctttcctactttttcttctagtagatagattcagtgtacctagttttatgttgaggtccttgatccacttggagttgagctttgtgcaaggtgacaaatatggatctattttaatttttctatataccaactgccagttagaccagcaccattgattgaagatactttcttttttccaatgtatacgtttggctttgtcaaagatcaaatgtccataagtatgtggttctatttatgggtctttagttctattccattgatctacctgtctgtctctgtaccaataccatgttgtttttatcactattgcctgtggtctgggatggtgattcccctagaagttcttttattgttaagagttgtttttgctatcttgggtttttttgtttttccatgtgaaattgagaattgctttttccatgtctttgaagaataattgtgctggaattttgattgggattgcattgaatctgtagattgcttttgataggatggccatttttactgttaattccaccaatccatgaacatgggagatctcgccattttctgaggtcttcttcaatttctttcttgagagatttgaagttcttctcatacagatttttcacttgtttggttagagttaccccccagacattttatatttttgtgactattgtgaagagtgttgtttccctaatttctttctcagcccatttatcctttgagtagaagaaggctactgatttgttggagttaattttatatccagccattttgctgaagatgtttatcatctgtagaagttgtctggtagattttattttagttgcttatgtatactgtcatattatctgcaaatagtgataccttaactacttctttgccaatttgtatccccttgatttccttttgttatcttattgctctagctagaacttcgagtactatattgaatagatacagggagagtggtcagccttgtcttgtcactgattttagtgggattgcttcaagtacatctccatttaatttgatattggctgttagtttcctgtatattgcttttattatgtttagatatgggccttgaattcctgatctgtctaatacatttaacgtgttgtattttgtcaaatgccttttcggcatctaataagatgattggttttactatctggttgctatctatatccatgtcaagtttccgagtcattcaaagactatgcttttactacaaccatttctgggttctaaattgctaattgtatttattataacaaagttggttttctttttctttaaaaatcacttctgcagaggaaaaggaattggcatatagaacacccatcctttcgagaagagaggtcacagcagttgagacggggaaatttcaagacagtggaagcagctgactctctctctaaagcatggctcaagtgtggagaaggatttcaggacacctctgagatcctggtaagaaagctattgtcatgaatggagaagatcctgagtatctagcctattgtagccagtttctttggaattctcttatttttcaaagcactacttttctttgtcatgctttgaattcctttaataattttatcaagttagtgtttccttcctttgtctctgtagaatctatgcatactaaggatgctgttaggtatgaaattattgagcatactattttatataacgaatagtattatgaaatatgtgtatactcagactctcttgtcagtccagttaatttttgtatatgttgtaaattataaaggagtggttttataaactaaaaatagtgtggttgaaggtagtgataagtggtagtcatatatatgagaaggcattgacattgactattatataaaatgtttcagcagttcagcttagagtcttgaaaaatatgaaaacaaatttgtgtgtctctaaggactacatgttttgggaaatactcacttggtgaatattaaaaaaatgcagaggactatatcaaggagagtataatttaatactgaatattttacaaaatattattagtgatatttagcctttccacatgagtcatataagttaaattatttttattattattttgcctgcagtcattagcaagtgaaaagacaggtattactgaaaagcacctggaattatctccaaaaccaaagacaggtaacaatgttttgttttaactctttctttctttctttctttctttctttctttctttctttaacctctcattttggagatcaaaactttggagtccttagacttgtatgcacctcactaaattcccaaaatctaaaatgttgatttattgacagtgaccttaaggctatttttcagtgattttttttttttaaatcttttaaaaatgtcacagtttggatagtttgcatattcagggttaaaatcaatgaaggtaaaaggtatttctgattcatctcaatcacaatctacccagttcttcctggtcctgttggtgactacttacattttgggtacccttactgggtttacttttttaaaataatttttaatttattctttcatatattatatcccgaccatagtttcctttcttctcttcttcctgtttctccccctaatcccaatgcattcctcctctattttccttcagaaaaaggtcaggcttcccagggatatcaaccaaacatggcattttaagttacaataatactagctaccttccctccctgggagaggccacctagtaggaagaaaagggtcccaaaagcaggcaacagagtcaagagtcaacccctgcttacactgttaggagtctcataagaagacaagctacacaccatagcatatatgcagaaagtctaggtcagacccatacaggctccacgactgtcagttcaggctctatgtgccactgtgaacccggggttagttgattctgtggaatttcttatggtatccttgacctctctggctcctataatctttccttctcctcatcttcaggattcactgaactctacccaatgtttgcctataggtctctgcatctgtttccatcagttgctagatggagcctctttgatgactgttatatgaagctcttgtctctgggctatctggcctctggttcctggttccctcttgtggcttgggtctcaagctagaccagtcattgcttgttcaatcccacaatttctgtgccatcattacatcttactgggtttattttagtcatagaatctaattcagcagttctcaacatgaaagtcgtgactccttttgggtgaatgacccctccacagggtcacctaacaccactggaaaagacagatatttactttataactcataactagcaaaatcacagttataaagtagcaacaaaaataaatttatatttaggggttaccacaatatgaggaactgtagggtcatagcattaggaagtttgagaattactgatctagtggggtagctcaggtttagaacatcagggagataatgaatcaataaataaacaaatgctttggtttgaattctagtgtcacaaaaaatttttcatatggaaaataaacatgatttatactataggaaccactgctacaaactggtgaattagttatggatgctttctaactacaaatacaaggaaactatgcacaaaaattagggattgatgttatcttcacaacaatacatccagagaatccagctattttgagtgctgtaatattaatatggggttggttctcctgggtgaaaggtggcagcttggtatcttagattaaattcttgaggctactgttggtgctgagggtttttagccaatgaactttggcttctatgggaagatagacctttacagaaccttggctagaacctgtcacatagggttatctccactaaagatggtatgatgaagttaggtgccacaggccctctggtcccctgtgcctgtgtagaaaagagtctctagagtagatgggcaaaaattaggatgtattgacaagcagtcaaacacgctagaatggtgttggatctgaatgtaatgttccagttgagcatcagacttttataatacagaataaattgcagaacaaggcacattgaatttttccaggtgcaaaaggagtgacttcaaaaggaaccagataaatgtttacattagagattagcactttctgccaggcaagagttttacactaattgttaatagccccagggtagttaactcttgacacgcctcaagaataatgtagtgtcactgaccccaaaattctctaggcctcgttaattcttatctatatctgaagactgtccattttcagtatagtatactaatttgctcttggcatggaatgtagtctgtaagaagaatttctatcttagtgagaattttagtctctatctgtaaacagctgagtaaaatggcaagtgcttaattgtttactgaatgggtaaaactccttgctgctatctggagtctaagaacactgggaaaaggctttagctatgttagaatacaatcttaaaaggcatttactataaggtaaagctatatagagtgcacatggatccatacactagactaaagtggatttggaaaattaattttatgggttagggaaatagccaaagatccgggagtaagtttccttgaaactctttcctcatgagaaagctttcagactttcatctgtcaagctgactccaccggagtccctggcagttagggaattaaaaaaatatatttattttatgtatatgagtgatctacctgcatgtacatctgcatgccagaagagggcatcagattacattatagatggtgtgagctaccacatggtggctatgaattgaactcaggacctctggaagaacagccagtgttcttaaacattgaggcatctttccagcccaaagctagggatttttatacacatataactctactagtaaacttagtgtgaattgtaatggagaagagtgggtatatgcagcaggtaccactgactttgttgctctcatctgcctggggtagattagaagagtgaaatattgtaatttcagagatctgttttcactggtcttgggaaattaagctaaatgatcacatctcagattctacatttgggaaatgggtatatgattgagggttttcttggtgattgtattaggtgagacaggaagataagaatttttgatgccaacacttgctgttgtgtctgatgacataaagagctgtatgtgggctgtatactggagtaactttctgtggtccagagactaaacattctaagacatgttatttcattttcctttacagtttattttcttcccccctcttttgagacagggtctcatgtaattcaagctgttgttgaatgtgtacctgaggctgaccttgaacttctgatcctcatgcctccatctgttgagtgctaggatagtagacatgcatcactatgctccaatagaagattctgagcatttaaactcagggtttcctgctttctagacagactgtctaaacattgagttacttccatacccagtgatctttttctatgtgaatgaaaaataaaatacccaaaatatttctttaaaatttataaaactctgtcttgtagaataaacaggcagaaatcattttgcaataccttttgatattagttcagaattatatatttctactagtgccaatgctcttatatttacaccagtttatgtttaatttttaagatataacatatagaaaaaaggtatgtatctttaaataaatatggtttgtgtatatttttttttctattttttattaggtatttagctcatttacatttccaatgctataccaaaagtcccccataacccccccccccactaccctacccaaccactcccccttttgggccnnnnnnnnnnnnnnnnnnnnnnnnnnnnnnnnnnnnnnnnnnnnnnnnnnnnnnnnnnnnnnnnnnnnnnnnnnnnnnnnnnnnnnnnnnnnnnnnnnnnnnnnnnnnnnnnnnnnnnnnnnnnnnnnnnnnnnnnnnnnnnnnnnnnnnnnnnnnnnnnnnnnnnnnnnnnnnnnnnnnnnnnnnnnnnnnnnnnnnnnnnnnnnnnnnnnnnnnnnnnnnnnnnnnnnnnnnnnnnnnnnnnnnnnnnnnnnnnnnnnnnnnnnnnnnnnnnnnnnnnnnnnnnnnnnnnnnnnnnnnnnnnnnnnnnnnnnnnnnnnnnnnnnnnnnnnnnnnnnnnnnnnnnnnnnnnnnnnnnnnnnnnnnnnnnnnnnnnnnnnnnnnnnnnnnnnnnnnnnnnnnnnnnnnnnnnnnnnnnnnnnnnnnnnnnnnnnnnnnnnnnnnnnnnnnnnnnnnnnnnnnnnnnnnnnnnnnnnnnnnnnnnnnnnnnnnnnnnnnnnnnnnnnnnnnnnnnnnnnnnnnnnnnnnnnnnnnnnnnnnnnnnnnnnnnnnnnnnnnnnnnnnnnnnnnnnnnnnnnnnnnnnnnnnnnnnnnnnnnnnnnnnnnnnnnnnnnnnnnnnnnnnnnnnnnnnnnnnnnnnnnnnnnnnnnnnnnnnnnnnnnnnnnnnnnnnnnnnnnnnnnnnnnnnnnnnnnnnnnnnnnnnnnnnnnnnnnnnnnnnnnnnnnnnnnnnnnnnnnnnnnnnnnnnnnnnnnnnnnnnnnnnnnnnnnnnnnnnnnnnnnnnnnnnnnnnnnnnnnnnnnnnnnnnnnnnnnnnnnnnnnnnnnnnnnnnnnnnnnnnnnnnnnnnnnnnnnnnnnnnnnnnnnnnnnnnnnnnnnnnnnnnnnnnnnnnnnnnnnnnnnnnnnnnnnnnnnnnnnnnnnnnnnnnnnnnnnnnnnnnnnnnnnnnnnnnnnnnnnnnnnnnnnnnnnnnnnnnnnnnnnnnnnnnnnnnnnnnnnnnnnnnnnnnnnnnnnnnnnnnnnnnnnnnnnnnnnnnnnnnnnnnnnnnnnnnnnnnnnnnnnnnnnnnnnnnnnnnnnnnnnnnnnnnnnnnnnnnnnnnnnnnnnnnnnnnnnnnnnnnnnnnnnnnnnnnnnnnnnnnnnnnnnnnnnnnnnnnnnnnnnnnnnnnnnnnnnnnnnnnnnnnnnnnnnnnnnnnnnnnnnnnnnnnnnnnnnnnnnnnnnnnnnnnnnnnnnnnnnnnnnnnnnnnnnnnnnnnnnnnnnnnnnnnnnnnnnnnnnnnnnnnnnnnnnnnnnnnnnnnnnnnnnnnnnnnnnnnnnnnnnnnnnnnnnnnnnnnnnnnnnnnnnnnnnnnnnnnnnnnnnnnnnnnnnnnnnnnnnnnnnnnnnnnnnnnnnnnnnnnnnnnnnnnnnnnnnnnnnnnnnnnnnnnnnnnnnnnnnnnnnnnnnnnnnnnnnnnnnnnnnnnnnnnnnnnnnnnnnnnnnnnnnnnnnnnnnnnnnnnnnnnnnnnnnnnnnnnnnnnnnnnnnnnnnnnnnnnnnnnnnnnnnnnnnnnnnnnnnnnnnnnnnnnnnnnnnnnnnnnnnnnnnnnnnnnnnnnnnnnnnnnnnnnnnnnnnnnnnnnnnnnnnnnnnnnnnnnnnnnnnnnnnnnnnnnnnnnnnnnnnnnnnnnnnnnnnnnnnnnnnnnnnnnnnnnnnnnnnnnnnnnnnnnnnnnnnnnnnnnnnnnnnnnnnnnnnnnnnnnnnnnnnnnnnnnnnnnnnnnnnnnnnnnnnnnnnnnnnagaagagtttttgctatcctaggttttttgttattccagatggatctgccgattgccctttctaattcgttgaagaattgagttggaattttgatggggattgcattgaatctgtaaattgcttttggcaagatagccatttttactatattgatcctgccaatccatgagcatgggagatctttccatcttctgagatcttctttaatttctttcttcagagacttgaagttcttgtcatagagatctttcacttccttagttagagtcacgcctaggtattttatattatttgtggctatttagaagggtgttctttccctaatttctttctcagcctatttgtcctttgtgtagagaaaggccattgacttgtttgagttaattttatatccagctacttcactgaagctgtttaccaggcttaggagttctctggtggaatttttcgggtcacttatatatactatcatatcatctgcaaaaggtgataatttgacttcttcctttccaatttgtatccccttgatctccttttgttgtcgaattgctctggctaggacttcaagtacaatgttgaataggtagggagagagtggacagccttgtctggtccctgattttagtgggattgcttcatgtttctctccatttactttgatgctggctactggtttgctgtagattgcttttatcatggttaggtatgggccttgaattcctgatctttccaagacttttatcatgaatgggtgttggattttgtcaaatgctttctcagcatctaactagatgatcatgtggtttttgtctttgagtttgtttatatactggattacgttgatggatttccgtttattgaaccatccctgcatccctgggatgaaacctacttggtcaggatggatgattgttttgatgtgttcttggattcggtaagcaagaactttattgaggatttttgcatcaatattcataagggatattggtctgaagttctctatctttgtggggtctttttgtggtttaggtatcagagtaattgtggcttcatagaatgagttgggtagagtaccttctgtttctagtttgtggaatagtttgtgaagaactgggattagatcttctttgaaggtctgatagaactctgcactaaacccatctggtcctgggctttttttggttgggagattattaatgactgtttctatttctttgggggatatcgggctgtttagatcattaacctgatcttgattcaactttggtacctggtatctgtctagaaacttctccatttcatccaggttctccagttttgttgagtatagccttttgtagaaggatctgatggtgttttggatttcttcgggatctgttgttatgtctcccttttcatttctgattttgttaattagaatgctttccctgtgccctctagtgagtctggctaatggtttgtctgtcttgttgattttctcaaagaaccagctcctcaattggttgattctctgaatagttcttcttgtttccacttggttgattttgcccctgagtttgattattttctgccgtctactcctcttgggtgaatttgcttccttttcttctagagcttttaggtgtgttgtcaagttgctaatatatgctctctctagtttctttttggaggcactcagagctatgagttttcctcttagaaatgctttcattgtgtcccatgagtttgggtatgaagtggcttcattttcattgaactctaagaagtccttaatttctttctttattccttccttgaccaaggtatcattgagaagagtgttgtttagtttccacgtgaatgttggttttctgttatttattttgttattgaagatcagccttagtgcatggtgatctgataggatacatgggacaatttccatatttttgaatctgttgaggcctgttttgtgacctattatgtggtcaattttggagaaggtaccatgaggtgctgagaagaaggtatatccttttgttttaggataaaatgttctgtagatatctgtcagatccatttgtttcatcacttctgttagtttcagtgtgtccctggttagtttctgtttccatgatctgtcctttggtgaaagtggtgtgttgaagtctcccactattattgtgtgaggtgcaatgtgtgctttgagctttactaaagtttctttaatgaatgtggctgcccttgtatttggagcatagatattcagaattgagagttcctcttggaggattttacctttaatgagaatgaagtgcccctccttgtcttttttgatgactttgggttggaagacaatcttatcagatagtaggatggctactccagcttttttcttcataccatttgcttggaaaattgttttccagcctttcattctgaggtagtgtctatctttttctctgagatgagtttcctgtaagcagcaaaatgttgggtcttgtttgtgtagccagtttgttagtctatgtctttttattggggagttgagaccattgatgttaagagatattaaggaaaagtaattgttgcttcctgttatttttgttgttaaagttggcattctgttcttgtggctgtcttcttttaggtttgttgagggattaccttcttgttttttctagggcgtggttcccgttcttctattggtttttttctgttattatcctttgaagggctggattcgtggaaagacaatgtgtgaatttgtttttgtcgtggaatactttggtttctccatctatggtaattgagagtttggctgggtaattgagagtagcctgggctggcatttatgttctcttagtgtctgtataacatctctccaggctcttctggctttcatagtctctggtgaaaaatctggtctaattctgataggcttgcctttatatgttacttgacctttttcccttactgcatttagtattctatctttatttagtgcatttgttgttctgattattatgtgtcgggaggaatttcttttctggtccagtctatttggagttctgtaggcttcttgtatgttcataggcatctctttctttagatttgggaagttttcttcaataattttgttgaagatgtttgctggtcctttgagttgaaaatcttcattctcatccactcctattatccgtaggtttggtcttcttattgtgtcctggatttcctggatattttgagttaggatctttttgcattttccattttctttgattgttgtgccgatgttctctatggaatcttctgcacctgagattctctcttctatctcttgtattctgttgctgatgctcaaatctatggtttcagatttctttcctagggtttctatctccagtgttgcctcactttgagttttctttattgtgtctacttccctttttaggtctagtatggttttgttcatttccatcacatgtttgtatgttttttcctctttttctgtaaggacttctacctgtttgattgtgttttcctgtttttctttaaggacttgtaactctttagcagtgttctgtatttctttaagtgagttattaaagtccttcttgatgtcctctaccatcatcatgagatatgcttttaaatctgggtctaagttttcgggtgtgttggggtgccctggactgggcaaagtgggagtgctgggttctgatgatggtgagtggtcttggttcctacctttacctttcgccatctggtaatctctggagttagtagttatagttgactctgtttagagattgttcttctggtgattctgttaccgtctatcagcagacctgggagacagattctctcctctgaatttcagtgctcagagcactctctgctggcaagctctcttacagggaaggtgcgcagatatcttgtgtttggacctcctcctggccgaagaaggaggcccaaaacaggacctttctcagaagctgtgttgctttggcaggtcccagaagctgtcagcttctgtggtgcagactctcacttgtgcagactaaattcctaagttctgcggagtcccggaaccaagatggcgaccgctgctgctgaggctgaggctgcctcccgagccaggcggacacctgtcctctggtccggtggccggctgtctgcggcccgcaaagggtgctgcctcagcggctctgtgcttccgcctgttccagaagctgtccggttctctggcgcaccctctcacctgttcagactaatttcctcgtgtatattttttgtagttgtagtatattcagctttgggagaaaattaaatattaaataagttgctacttgtacttaactacaaaacattcttttgagatgatttccttaggctagaacatacttgactcaaaattttgttatattgttattagatgatatacaatatattctaaaaggctcaaagtttgtaccaatgtactttatatataacacggtgatagttaaaccaagatgaagatataaaaggcttatgtatagaggtcagtgagaaaggtatgtaaagcacttcctagaattggtagcttttaaaattagttaacagtagcctattagtaagaattacaagataaaattttgctctaaggccagaccagccaggagtgcataggctgcagaagtggcagagcaactgagacagggtccttcctgcctccatatgcacctaggaagtggggttgttcctgccaggggagagcttgcatccagggagtactctgaccccaggactcaggtgagaacaatattttctctcctgtgactatctaaggagggaccagccaggagcgcataggccacagaagctgcagagcagctgggacagggtccttcctgcctccatctgcatccaggaggtgaagctgttccccagccctctgtgcactggtcttgccaagagagagctgcctcccaagagtaccaacacaggcttacagactcacaggaggaacaagctccagcctgagacagcaagaacatctaacaccagagattaccagatggggaaaggcaaacacaacaatcttaccaaaagaaacaaagactacttggcatcatcagaacccagtactcccaccacagcaagtcttggatacaccaacacaccggaaaagcaagattcagattgaaaatcatatctcatgatgctgatagaggatattaagaaggacataaataactcccttaaagaaatgcaggagaacacaggcaaagaggtagaagcccttaaagaggaaatacaaaaataccttaaagaattacaggaaaatacaaccaaacaggtgaaggaattgaacaaaaccatccaggatctaaaaatggaagtagaaacaataaaaaaataacaaagggagacaactctgaagatagaaaacctaggaaagaagtcaggagccatagatgcaagcattaccaacagaatacaagagataagagagaatctcaggtgcagaagattccatagaaaacatggacacaacagtcaaagaaaatgcaaaatgcaaaaagatccaaactcaatacaaccaggaaatctaggacacaatgagaagaccaaacctaaggataataggtatagaagagaatgaagatttccagcttaagaggccagtaaatattttcaacgaaattatagaagaaaacttccctaacctaaagaaagcaatgccgattaacatacaagaagcctacataactccaaatagcctggaccagaaaagaaattcctcctgtcgcataataatcaaaccaccaaatatataaaacaaagaaagaatattaaaagcagtaagggaaaaaggtcaagtaacatataaaggcagacctatcagaattacacaagacatctcaatagagaatgtgaaagccagaagatccgaggcagatgtcatacagaccctaagagaacaaaatgccagcccagactactatacccagcaaaactcaattaccataggtggagaaaccaaaatattccatgacaaaaccaaatttacataatatctttctgcaaattcagcccttcaaaaggtaataaagggaaaactccagcacaaggagggaaaaaccattctagaaaaagcaagaaaataatctttcaacaaacctagaagaagatagcaacattaacagaattccatctctaacaacaaaaataacaggaagcaacaattacttttccttaatatctctcaatatcaatggactcaatttctcattaaaaagacataaactttgctcagctctgagccccattttttaatggggttatttgattttctggagtccaccttcttgagttctttatatatatattggatattagtcccctatccgatttgggataggtaaagatcctttcccaatctgttggtggcctttttgtcttaatgacggtgtcttttgctttgcagaagctttgcaattttatgaggtcccatttatcgattctcgatcttacagcacaagccattgctgttctattcaggaatttttcccctgtacccatatcttcaaggcttttccctactttctcctctataagtttcagtgtctctggttttatgtggagttccttaatccacttagatttgaccttagtacaaggagatagaaatggatcaattcgcatttttctacatgataacagccaattgtgccagcaccatttgttgaaaatgctgtcttttttccactggatggttttagctcccttgtcaaagatcaagtgaccataggtgtgtgggttcatctctgggtcttcaattctgttccattggtctacttgtctgtcactataccaataccatgcagtttttatcacaattgctctgtagtacagctttaggtccagcatggtgattccaccagaggctcttttatccttgagaaaagaatttgctctcctaggttttttcttattccagatgaatctgctgattgccctttctaattcgttgaagaattgagttggaattttgatgggaattgcattgaatctgtagattgcttttggcaagatagccatttttacaatgttgatcctgccaatccatgagcatgggagatctttccatcttctgagatcttctttaatttctttcttcagagacttgaagttcttatcatacagatctcagagttgagcaaagaattctcacctgaggaataccaaatggctgagaagcacctgaaaaaatgttcaacatccttaatcatcagggaaatgcaaatcaaaacaaccctgagattccacttcactccagtcagaatgcctaagatcaaaaattcaggtgacagcagatgctggcgaggatgtggagaaagaggagcactcctccattgttggtgggattgcaagcttgtacaaccactctggaaatcagtctggtggttcctcagaaaattggacatagtactaccggaggattccgaaatacctctcctgggcatatatccagaagatgtcccaaccggtaagaaggacacatgctccactatgttcatagcagccttatttataatagccagaagctggaaagaacccagatgcccctcaacagaggaatggatacagagaatgtggtacatttacacaatggagtactactcagctattaaaaagaatgaatttatgaaattcctaggtaaatggatggacctggagggcatcatcctgagtgaggtaacccaatcacaaaggaactcgcacaatatgtactcattgataagtggatattagcccagaaacttaggatacccaagatataagatacaatttgctaaacgcatgaaattcaagaagaacgaagaccaaagtgtggacactttgccccttcttagaaatgggaacaaaacacccatggaaggagttacagagacaaaatctggaagtgtgacgaaaggatggaccatctagtgattgccatatgcagggatccatcccataatcagcttccaaacgctgacaccattgcatacactagcaagattttgctgaaaggacccagatatagctgtctgcttgtgagactatgctagggcttagcaaacacagaagtggatgatcacagtcagctattggatggatcacacagctcccaatggaggagctagagaaattacccaaggagctaaagggatctgcaaccttataggtagaacaacattatgaactaaccagtacaccggagctcttgactctagnnnnnnnnnnnnnnnnnnnnnnnnnnnnnnnnnnnnnnnnnnnnnnnnnnnnnnnnnnnnnnnnnnnnnnnnnnnnnnnnnnnnnnnnnnnnnnnnnnnnnnnnnnnnnnnnnnnnnnnnnnnnnnnnnnnnnnnnnnnnnnnnnnnnnnnnnnnattgaaaatgtaaatgaggaaaatacctaataaaaaaaataaattaaaaaaaaaagacataagctaatggactggttatataaacagaacacaacattttgctgcatataggaaacccacctcagtccaaagacagacactacctcagaataaacggctagaattttcaagcaattggtctcaagaaacaagctggagtagccattccaatatagaataaaatcgacttttagtgtaaagttatcaaaaaagataaggacggacacttcatattcattaaaggtaaaatctaccaagatgaactctcaattctgaatatctatgttccaattcaaggacactcacattcataaaagaaactttactaaagctcaaagcacacattgcaccccatacgataatcgtgagagacttcaacaccccactctcagcaatggacagatcatggtaacagaaactaaacagagacacagtgaaactaacagaagttaggaaacaaatggatttaacagatatctatagaacattgtatcctaaaacaaaaggatataccttcttctcagcacctcatggtaccttctacaaaattgaccatataaatctgtcccaaaacaggcctcaacagatacaagaagattgaaataatctgatgcatcttatctgatcaccacggactaagcctaatcttcaataacaacataaataatagaaagcccacatacacgtggaagctgaacaacactctactcaatgataacttggtcaaggaataaataaagaaagacattaaagactttttagaatttattgaaaatgaaggtacaacataaccaaacttatgggacacaatgaaggcagtgctaagaggaaaactcatagctctgagtgcctcccaaaagaaactagagagagcacacactagcagcttaacagcacacctgaaagctctaaaacaaaaagaagcaaattcacccaagaggattagacagcacagaataatcaaaatcagggctgaaatcaaccaaatggaaacaaaaagaactatacaaagaatcaaccaaagcaggagctggtttctttgagaaaatcaacaaaatagataaaccttacccagactaactagagggcacagagacagtatcttaattaacaatatcagaaatgaaaagggagacataacaacagaaactgaggaaatccaaaataccatcagatctgtactggctagttttgtgtcaacttgacacagctggagttatcacagagaaaggagcttcagttgaggaagtgcctccatgagatccagctgtaaggcatttcctcaattagtgatcaagggggaaaggccccttgtgggtgggactatctctgggctggtagtcttgggttctataagggagcaggctgaacaagccaggagaagcaagccagtaaaaaacatccctccatggcttctgcatcagctcctgctttctgacctgcttgagttccagtcctgacttcttttggtgatgaacagcagtatggaagtgtaagcagaataaaccctttcctccctaacttgcttcttggtcatgatgtttgtgcaggaatagaaaccctgactaagacaaattgataccagcagagtgaggtattcctgtgacaacctggccatgttttggggaggactgtggaaggactttggaactttgggatagaagacccattcggtgttaagacctctgtcagatgttgtgtaggagcttggaagataatgttgaaaacagtgcaaaagatggaggcctggcttgtgaaatttcagagggaaaaattaaagactcttttcagggccattgttactttggttgtgaagattctgtgtttctggttagctggggctgaagaatcagctgtgattaacaagataccagaactactaaagcataaactttgcattactgggactgttgatgctggttagctggagctaagaaattagcggtgcttaagaagagaccagcatcattgaggtgacatcttctgggaagtgttttctgaaagcatagaggctgtgttccagagatagccaagtttgtaccttgtattgtggctggacttggtaatatgtaagaatcacccaggtggtactggttttgaaggcatgaaggggtcacgcagagcagctgcggcccacactgtgagaggccatggaaggccattggtgaaggtgcagcctcagttgcaattgatggcccatgactgaaggggtcatgcagtgttttggaaatgccagtacaatgagatgaccatcaagagcagcagcaaaaaaaaaaaaagaaaaaaaaaagagcagcagcagtggagtacaggcatctggagcctagaggacgacatgtgtgttacaaagggcatggctggagaagtgaccaagcccttggaggagcccagaagatcatgagttggatcccagacattgaacggttggagattgagttttgcttttgattgtgactgtgccctgatattttccctcttgaagaaaaaaactatttagtggagcccacagttaagagacttttaattgtaaaaagactttggattttaaaagaaatggatattttaaagagattgaaaatttaagaatatataaagactgtgggatgtgtaaagttatttagatcttggggatgaataagaatgtaaggttgaggcttactagtgatgtgtttgtgtgtcaagctgacaaggggtcaattgtactggctaattttgtgtcaaattgatacagctggagttatcacagagaaaggagcttcagttgaggaaatgcccccatgagatccaactataaggcatttcctcaattattgatcaagggggaaagaccccttgtgggtgggaccatctctgggctggtagtcttgggttctataagagagcagcctgagcaagccaggagaagcaagccagtaagaaacatccctccatggcttctgcatcagctcctgctttctgacctgcttgagttccagtactgacttcctttggtgatgaacagcagtattgaagtgtaagcagaataaaccctttcctccccaacttgcttcttggtcatgatgtttgtgcaggaatagaaactctgactaagacaagattctactacagaaggctatgctcaacacaactggaataactagatgaaatagacaagtatctagacagagcagatactgaggttagatcaggatcaggtaaatattctaaacagtcccatatcccttaaggaaatagaaacagtcattaatagtctcccagccaaaaacaacaacaacaacaacaacaaccacaaaaatccaggaccagataggtttagtacagagttctatcagaccttcaaagaagacctaataccaatactcctcaaactattccacaaaatagaaacagaaggtactctacccaattcgttctatgaagcctattattctgatacctaaaccacacaaacacccaacaaagaaagagaacaactgaccaatttcccgtatgaatattgatgcaaaagtactcaataaaattaagcaaatccaatccaagaacacatcaaaatgattatccatcatgatcaagtagactttatccaagggatgcagggatggttcaatgtacggaaatccatcaatgtaatccactacataaacaaactcaaagaaaaaacccatatggtcatctcattagatgctgagaaagcatttgacaaaagccaacacccttttatgataaaagtcttgaaaaaatcagcaaatcaaggcccacacataaacatacaaaaagtaatatacagcaaaccagtagccaatatcaaactaaatggagagaaacttcaagcaatcccagtaaaatcagggactagagaaggttcctctctctctccctacctattcactatagtacttgaagtcctaggcaaagcaattagacaacaaaaggagatcagagggatacaaattggaaaggaagaagtcaaaatatcactgtttgtggatgatatgatagtatacttacgtgacttctaaaattccaccagagaatttctaagcctgataaacaacttcagtgaaatatgtggatataaaatttactcaaatcagtggcctttctctagacaaaggataaacaggcagagaaagaaattagggaaataacacccttcaaaatattcacaaataatataaaataccttggtgtgattctaactaaggaagtgaaagatctgtatgataagaacttcaagtctttgaagaagtctcagaagatggaaagatctcccatgctcatggattggcagaattaatatagtaaaatggctaccttgccaaaagcaatctacagaatcaatgcaatccccatcaaaattccagctcaatttttcacagaattagaaagtgcaatttgcgaattcatctggaataacagaaaacctaggatagcaaacacttttctcaacaataaaagaacttctggtggaatcactatcccttacctcaagctttactacagagcaattgtgataaaaaaaacttcatggtactggtacaataattgataggtagatcaatgagatagaattgaagatcctgaaatgaacccacatacccatagtcactttatctttgacgtggagctaaaaccatccaatggaaaagagacagcttttttaacaaatggtgctggctcaactagtgcttagaaagtagaagaatgtaaattgacccattcttatctcctagtacaaaggtcaagtccaagtgggtcaaggatcttcacattaaaccagatatattaaaacttatagtggagaaagtggggaagagtttcaaacatattggcacaggggaaaaattcctgaatagaacagcaatggcttgtgctgtaagatcaagaattgacagatgggacctcatataattgcaaaggagactgtcaataagacaaaaaggcaaccaacagattgggaaaagatctttaccaatcctaagtccaatagagggataatatccaatataaacaaagaacacaagaagttagactccaaagaaccaaataacactattaagaatgggtatagagctaaacaatgaattctcaactgaggaatactgaacggctgagaagaatctaaaaaaatgttcaacatccttattcatcaggaaaatgcaaatcaaaacaactctgagattctacctcacaccagtcataatggctaagattaaagactcaggtgacaggagatgctggccaggatgtggagaaagagtaacgctcctccactgctggtgggattgcaagctgatataaccactctggaaatcagtttggtggttcctcagaaaactgaacatagtactacctgaggacccagcaataccacttactcgaatatacccagaagatgctctaacttgtgataaggccatattctctaatgtgttcatagcagccttatttataatagaagctggaaagaacctagatgttcctcaacagaggaatggatacagaaaatgtggtacatttacacaatggagtaccacacaactatcaaaaacaatgaatttatgaaattcttaggcaaatggatggatctggaggatatatattatcctgagtgaggtaacccaatcacaaaagaaaacacgtgaaatgtactgactgataagtggatattagcccaggagctcagaatacccaagatataatttacaaaccatatcaaactcaagaaggaagaccaaagtgtggatactcgagccctcttagaagggggagcacactacccatggaaagatttacagagacacagtgtggagcagagactgcaggaatgaccatccagacacttccccattggggatccatcccatatacaatcaccaaacccagacactattgaggatgccaacaagtgcttgctgacaggagcttgatataggtgtctcttgagaggctctgccactgcctgacaaatacagaagtggatgctcacagccatccattggactgagcatagggtccccaatgagggagccagagaaagtacccaaaaagctgaaggggtttgtagccccataggagaaacaacaatatgaactaaccagtacccccggagcttccaaggggtaaaccaacaatcaaaaaatacacatggttgagacttttggctccagctgcatgtgtagcagagcatggcctagttggccatcaatgggaggagaagcccttggttctgttaaggctatagtcccagtataggggaatgccagggccaggaagcagagtgggtgggttggtgagcagggggaggtgggaggcgatagtggttttcggagtggaaaccaggaaaggggataacatttgaaaagtcaataaagaaaatatctaataattttttttaaactctaaaaaacaagataaaaatttcaaaaacaataacaaaaatcctccaaaatgaaaatcaatcaatcaaacaaacaataaacctcaaccatatttatttagtaggctgaagaactaatatttttatgagagctggaaaatataagaaacacatttttgtaagtaattcttagggtctgagtctatgttcatggttgggttgttttgtttttgttttttttttttaaactttctgtgttgtgttttataatttttttgaactccagcttttgtccttggcttaaattcagagaatccttgtggactgttcatggaacactaagtaggaagatctaacactacatagtttttattgtctttagtgtttttgtgcttgtggctttgtctaaataatatgcattaaaatcctggcctttaatctcagccctgcacttgaggcagttctctgaatttgaggccagtctggtctacggggtgagttccaggacagccaaagctacacagagaaatcctgtctttaaaaaaaaaaaaaaaaaaagaaaagaaaacacaaaacaaaaggaaaatagcataaaatctcattctgatcaataacaattaccagctgatcttgtcttttctttttctgcaacagaaactacaagtaagaatgctagtgagcttccaaatataatatggagttccagtgaaagtgatttctccgatgaagataagacacttcctgcattacagagagatggtaggcatggccctagagccgacaggcttggtgacaggactatctcatgtcccgaagacgaagacattgaaggtaaattgctggttttgtaggaagttcagtttctgttaaatattgggtttggtagttttttgtttgtttgtttgttttttgttttttgtttttttgttttggtttttcgagacagggtttctctgtatagccctggttgtcctggaactcactttgtagacctggctggccttgaattcagaaatcctcctgcctctgtctcccaagtgctgggattaaaggcgtgtaccaccaccacctggcttggtagtagttttatgtatttattatgaatttgtttattatgaattatgagttcatatatatatctagccctttagaaacatatttctcatgacaactttaagaaatagatattacagtgacttcttattttgttttttaaaaaatattttattcgctctttgggaatttcatatcatgccccccaattccactcatctctctgtcccctcttactcgccttttacccttttgaactcccacaccaaaagaaaagtcatctcattgctgaagctgtagtgtgtcacagtgtgtctcacagtatactcttttgtctacacttctttgcttacaatgttcattgcaatggctcgttgatttcgttggaggcctctggcttctgctacactatctggaacttcactgggactcctctcggatatcttgttgttgcccggtgttgtggagatcctgtagttttggatctgtaggaccagccccttcacacagtctagcatttcattgatggggtaggtgttggggtaggcaactcaaagaactgaatctgggcctgagaggtatatgagctggccagcccaccagctctcctgcatttacaccactagggtgagccctctagccctactctggctagctcatccaaatgcctaacccaggaaggggtaggtagggtcagctttcctgatctcatgccttcattactaggtccctcataacccctgaaactagggccagctctactttgctgcccacatgaggtatagggcccactctcccaagtgttgcagctgttgagggacaggaccagttctctcactctcatgactccagggccagatcatttgcaaccccaccaccagggtcagctcttctgtgctaccttggtgaggggcagggtctgctctcttgctcttatgaccccagggccacaggtagtgaggggcaggagagactctctttctcttcctctctcttcctctctcttcctccctccctccctccctccctctctctctctctctctctctctctctctctctctcattcatgccattgcactggagatgagtggcagggccagctctcccagacacaccctctgggctggcttcactttcctgagtactgcagctggctaggtgtggggtcagctctcccactctcatgcctgcaagatcagctctcaagatgctcaggtgagccagcttggcctgcttatggcatcccagcctgtcttagtcagggtttctattcctgcacaaacatcatgaccaagaagcaagttggggaggaaagggtttatttagcttacacttccacattgctgtttatcaccaaaggaagtcaggactggaactcaaacaggtgaggaagcagaagctggtgcggaggccaaggagggatgtttcttactggcttgcttcccctggcttgctcagcttacttcttatagaaccaagactaccagcccaggcatggcaccatctgcaaggggccctttccccttaatcactaattgagaaaatgccttacagctggatctcatagaggcacttccccaagtgaagctcctttctctgtgataattccagcctgtgtcaaggtgacatgcaaaaccagccagtacacaacccatgcttggttctatattgagatcttgttccataaaacaaaatctaggggctggggaaatgcctgcatcagtaaagtgtggctgcacaatgtgaggacttgatctcgatctctagcagccatttttttttttttttaaatggacacactgaagtggaagagaagggaaaatccctcgtgctttcaaaccagctagttagtcaagtcatcctgcttgggaagagaactcaaaatataagattgaaagtcacgtaggatgatacctgactctgatttctgacctctgcacacatgtacaagcatgtatgtatatgtgcatcctcacacactagccaataaattaaaaattagattatgtaaactgtgataatatgtaacatgtgttgactttcttataaagctgatcctcggagtctgaagtcatgcatacagctgttggagtgtctcgcctttcagttctccttcacactatttcctcctttaattttttaaaaaatctttaatagataatcagtactgctgatatcaagattttattttgtttaagacatggagctgggaattaaatatgttatttccatttttatatatgctcttatttcatgacctaagaaataacctcaatttattaaaagaagattggaactataaaagggcatatgattgttgctgagccatctcttcagccccatgtactatattttaactctattattattttttttctttaaaattttaacttccagtcaggtactaaatctggtacactcataatgagttattacttcctttcagtgggagaaaatgatgctcttccactgagtgagatccattatcttagttctctgagtacttgtacttcgaactgtaggaaagatgtatgttatgtatcatactttacagtttagtctatctgtgacaaccactttcagttatatagacttagcagattagatttagtatatttagtatattttagttaaaaataaatatatgctgggcggtggtggcacacgcctttagtctcagcacttgggaggcagaggcaggtggatttctgagtttgaggccagcctggtctacaaagtgagttccagaacagccagggctacacagagaaaccctctttcgaaaaaccaatatatatatatatgtgcataatttagctttctttcttaaaattttctaaagttataatgagattatgtttatgaaataaaatgaaattaaattagtgtgtttccatattgatgaaagatatttcctgaataaaattttgggtgatttcttttaatttaaaaaatttatttatttttatttttattttatgtatatgcatgtttgttcaccacacacatgcagtacctatggaagccaaaagagggcattggatttttttggagtagtaattacagacttttttttagaaccatgtgggtgccaggaatggaacctaggtcctctgcaagagcagtcagtacttctaactactgaaccatctctctaccctgaaaattattttttaacaatggactatataaataagtcatggttcattgatagcttagactactgaattatgtagaagaatgaggtagctttctgtatattggtaaggagagatttcttcacgatcttaatttagaaaacatcaagatgtataagacaggagaaatgatatttatcttattttcttgagcacgctgcagaaactacaaggacttgaaaccagttgaataaatacttgttcacttatgtttgaggttgggtaagagttgggaagaactgtggctagagagagaattggagaacattttttactgtaggtgtgtttgtagaaatcatctcatgctatgggcacatcagccactgagaatatgtttgtaaaataaatgtgaaggggatatagaattaataagggtaaaaatgtattttttagatgaattacaggttattgactgggaggttaacagtgacaaagaagatcctggtgggcctagtgagtgtgaagatgataagggtaccctggacatctcagattgtgattcctgtgcaagtctgacaagtgatgacaggctatgtgagccttctgaggtaagaacagattgtttaaaaatctattattgttcttataacattggtaattgtaacttaggtgacaacacatgttgacaagaatgtagaggaagagaaacactcttccattgcttgtgggtacaatcacaaactggcacaaccactctggaaatcaatctggaggttcctccgaaaattggaaatatatctacctgaagacccagctataccactcttaggcatagtcccagaagatgccccaccatgctacaggggcaagtgttacactatgttcatagcagccttgtttgtgatagccagaagctggaaccaacccagacgtcccacaatagaagaatggatatagaaaatgtggctcatttacacaatgcaatactacttaggtattaagaacgaggacatcatgagttttgcaggcatatggatgaaactaggggagagggagaggaaaaggggaacatgattaggtattgggggtgggggaacaggagagaaaccctgggaaccatcagaatggacagaaatatgcaacctctggaggggcaggtgggggaccctctagaatgtaccagagacctgggaggtgagagactctcaggattcaaagggaggaacctttgatgaaatgccaacagtggggagagggaactcatatactccacctccagtagaaagacagggcatcaagtggagagatggagttgccaacccacactcaaaaactctgacccagaatgtccctgtctaaaagaactgcagggacaaaaattgagaaaagcctgagggaaaggcagtcccgtgacttgggatccatctcagggggtgaggggctccaaggcctgacaacatttttttttgcctctttggttttttttagttctttgtataatataatatcaagaatttgatattaatcctttgtcagatgtatacctggcaaagattttctcccattctgtgggattaaatttcacccatttaattgtttctttagttgtacagaatccattttgacaagtctcacctgccagttcttggacttaattcttggatacaaggaatcctattcagaaaatcttttcttgcaccaatatcatgtaggatactcactgtattttcttctagaaattttagtgtttcagagttcacatttaggtgtttgatgcatttggagtcagtttttgtgcagggtaattttggtaggtatggacctcatttcattcttttgcatgtagacaacctgtttttccagcaccatttgcagaagatgcttttttccttatagttttggcatctttgtaaaatattaaattgctgaagttatgtatactattgtcaggatctttgattttgttccaatggtctaccacccttgtcttttgattggagaattgaggtcttttacatttaaagatgtttttgaaaagtgtattgatggcaatcattgtatttttgatttttggtggtgttgcttgtgttctcagtggtactttttgtttataataagttacacctttttctttctcctattactgggctgtgtttattcctctcttcagtttgataaattcctcctgtatttttgttagagataaagatattgctctgtagatactttttaaaagactttatattgtggaaagttctgtgtgtgtcagctatgacagttttgcctggtatagtaatctagattggttttcatggtattttatacttgggagtgcattgcttcaggttctgctggctttaagagtttccactgaaaaatctgcagttactgtgattggttttcctatatatggggcttatgtttcttttcttgaggctttcaatactctttctttgttttgtattttgctgttttaactatgatatgctatggggattttcttttctggtcttgcctatgtggtgttctatgtgttccttgtaactgtatggacttgtctttcttaagtttatagaagttttcttccatgtttttgttaaagatctggtctaggccattaacttgaatacgtctacatttattgtaataattctaactttttttagtttttttttgttttgttttggtttgtttgtttgtttttgctttcatgatgtgccacattctttcctgactttacttttttttccatattctttgcttatttcatctagatcatctnnnnnnnnnnnnnnnnnnnnnnnnnnnnnnnnnnnnnnnnnnnnnnnnnnnnnnnnnnnnnnnnnnnnnnnnnnnnnnnnnnnnnnnnnnnnnnnnnnnnnnnnnnnnnnnnnnnnnnnnnnnnnnnnnnnnnnnnnnnnnnnnnnnnnnnnnnnnnnnnnnnnnnnnnnnnnnnnnnnnnnnnnnnnnnnnnnnnnnnnnnnnnnnnnnnnnnnnnnnnnnnnnnnnnnnnnnnnnnnnnnnnnnnnnnnnnnnnnnnnnnnnnnnnnnnnnnnnnnnnnnnnnnnnnnnnnnnnnnnnnnnnnnnnnnnnnnnnnnnnnnnnnnnnnnnnnnnnnnnnnnnnnnnnnnnnnnnnnnnnnnnnnnnnnnnnnnnnnnnnnnnnnnnnnnnnnnncccaagttctgggattaaaggcatgcgccaccactgcctagctataatttgccttttacttgatgtgtgaacactgggtcttcttaccagcaccaggaccacaatgtatataggtttcatgatatagctatgggggcagaatggctgtggcacatagatcaggggcaggaagctcagatcctggacctgctgcagcccaggatgacagtggctcagcatgtatatagctgagcatgctctgggcagggcagagcctcagtgtcagaaagggcaattgtgttgtaaaccggcctgcagcctacttgaacagggtacacctgggaggcaggttggggctgaaaaagacttagacggtgagagagattaatggagaccaagacacgattttgttcaaggcccgccagtttactaagagagtgtgcttataagggggaaggcccacccccctccagtccactcttggtgtctggagccagcctgtaggtgacgggcaggaatggttgttcctctggaatatctcaggggcatctcagcaggtagcagtgtcctggagagagcagtggcaggtgacagagcaatagagccatctaggtcggaaggctccaccctaggtaatctccttcttagtggcagcaaggtcaaagtctggatctgcctgcttgaggcttggggagcctacaaattagactctgctgttataagtttataaactataaaactaggttataatgagagatctttatatatagctactataatactaatttctgtctgaatagagtagtggtgaatttcataagtttaagtgtattttgctacttttctttgtttgtttgtttcttttttttttttttcttataaaaaacaacatttaattggagctggcttacagattcagaggttcagtctattaccatcaaggtgggaacatggtagcatccaggcaggcatggtgcagaaggggatgagagttctgtgtcttcatccaaaggctgctagtggaagactccttttctttgtttcttgtttaaaaatttatttaatgtttatgaagttttcagtcttccttcttttatttctagcttaattttatgttccaaaagttagtttggtgttctttcaatcttacacagaagtgtagagcagtggttctcaacctgtgggttgtgacccctttaagggtcccaaatcaaatatcctgcatatcagatatttacattatgattcataacagtaacaattacaattatgaagtagcaatgaaagtaattttatggttgggtgcctacaacatgaggaactgtattaaagtttgcagcattaggaagggtaagaaccccttgtatagagacttatgttgtagtttaatgtgttttggtcaatgatatcatgctttcggtggggcagcacagtggccacttagtcgtcccctggtgcgcaacagagctgacatcactggtagcttcctgttgggtttttctctgggtcttactcttgcttctctctgttttttccctccaatattttggtcttattgttgcatgaagctgttcaaggagttgggaatataatgttgagctagaaaaaagacagctgccctcccgacaagggcaatgtcataggttaaatttactgcacaataagtaagaacacatgtatgtaaacaaataaagcagcagcaacttcttaatgcagttcagttataaattttcttcattatttgcctcatggtctagtctatcattaaagtgggatacctggcccacacccaggtctacaattctttgggtagtccatgaatattgtttagtcccagtggccctttggacccacaattttttcctggagactgacacatcagcttggaggaggaccaagtattgggcccaattgtccgacaagaattgggtggatttcccttttactttcaaggttaccccgggctgggggagggggtctgagccctgtcctccctagttgctgtctttccccagggctaacactttcaccatttggggatgcttttcccaaggcctggaatttcccacctctggcttccttttgttggggcactcttgggctcagtggcccctctccttgcaatatgcacattggttattttcaaggggctttctgtctttctttggttgggggtctctcttctttgctttccctaattaccatagccaagattctctgtaaattccttccttgtcgcttttcttttttcttctctgctttccctaattaccatagccaagattctctgtaaattccttccttgtcgcttttcttttttcatcttcttcctttctctttctctgctccttttcctcctctgtctccctgtaatggtagactttctcagcaaccttcactaaatccttcaacaatttatcctgtccctctagtctcagaagctttttcctgatatctctactagcctggtctataaaagccatagtcacagtagctttgtgctcctcgctgctgggatcatagggtgtatattgaaggaatgcctctatgagctgctctagaaaggcagcaggagactcatctgatccctgtctaacgtcatgtatcttggtcaaatttgtggacctcagggcagctgtcttgagacctgtagatagagattggtggtagatcttaaagtactgaattaaagtcccaatcaggttaggttgaagggaattctgtgttaataactgctgggttttcctagggagctcctgtgtctgaggacacattcctttggacctcgttgaggatcctttctctctctgtagtggtaaagaggtaggctgatgggtaaataggatagtttcaaagagattaatcaaacccttgggattatctgagaaagggggatgctgagactttcacttgcataggtcagcagatgagaccacccaatattgcatagcctgattgccctcattatctagaggtctatatgtcctcagcgggaaagccaccatggtatcaggggaggtagctctctggctttgggtccccctggtgggaccgggaagttgggggtctcctcctgctcctccttctggtaaaggcggcggtggggggaggtacaacagccccagttctatatggagcaaggataccagagctggtgttggcacttatggaggatgagggtctaggaacaacaggtctgctgtcaaagggtcttggaggattgacttctcagatctggatccctcctcccatggttcctatttcctgatggccggaacctttgaggtgtgttttggggaaagaaaggctttcatccatggagggtggggggtgggttggaggggtcctccactagattcttccaagttattatatagggtacctggttagggtgaccacatggttcctgtctaaaaagcttccttcaactgccctgatgacaagcaagtcgaagggctctgtggtgccaaaggcaggccactctgaggaacatagggtgactaattttcccttgtttactacaacagacaggttctctcctctttccttaacttccttacaatatgctattaagatattcagcagggtagactcagtctgttccatgtccaaaaatattgtcagtccaactccaagaacacagaatgaaatatccaacaaacatagaaaccatggtataacaacaaacacagaaaccgaaccctccaagactttaggagttgaattagagtgtgactcagctggaattggctgcctgctatatccgcatgctcagaagggaggagagtccttctgactccctccagggagtttgagtatcttccagacttcccacaggaccgacaatgtgcccctgttaattgctgccctattcagtagccctcttgctcatgagccaaagtgaaagtaaaaaacaaacaaacaaacaaacaaacaaacaaacaaccccagcagtactcactcactcttcacacttaagacactcagacttgagcttgagcctggtcctctgatctgggtggtctcaagtaccactcttggggggtgggaggagtgtcagatcccagacgagcccccagatgtaaagccccagagggtctttacttgcttggagacccctgagtgagacattgagactcagattggtgcaaaagcaagaggtttatttttcctgcgcactgggatcaaccttcagcaatctctcaagggatgagaggtgatccccattctaacttacaaacaccttttatacattttttagagggcagattacattggtgatggctggccttttgcttatttgcttatcagatcatcctgggagagtatctttgtttcccagagggcccagatggccttcatccagtacattttatggtttttctgacaaatgtttagtcagagtcatttctatgaaattgtctgtggggcctgagaatataaatctctcccttggggcctaacaccctttcctggagccatctcagggttggatcaaaattgcttaatcttatcgatctcaaataagagacataaaacctttatatttttaattagtcttgtagcactagaactgggcaggtatcagccctctgtgctgttttgtctacttccctgtcaataaccctgaaatataactttctgtgttccttctggactgctcttactccaattggcttgttctcatagtcatgttctcaccacccacctaccttatggtgtctctccttcctcctctctccttccctagggtctctgcctcagaactcaagtctgggaaccgaagctctgccttacactcttctgcccagctacaggctacaggcatctttattcaaccagtagttttaaactaaggagcaaggttgcatatcatcttgtggtatacatgagaatctccttgtccttgaagcaaccagagccaatatttagtattacaatacacagcaacagaccaaacttcaacatgcaactttttatgtgtgtgcacttgtgccagtgacatagtgttctgctgagttgttaattggtgaagacatctgacttcttcacagtcaggattagggttattccaataagttccagtacttattctgatatagttgggaatgctcctcttgcttttacatgtgaggtagtctagggaatgaatcgttttaaaacaagcttattagtatgtttgattttcatgattacaattttttcttcttgtatggctctggtagagggcttgttgcttacattcttggttacgtgacttagcatgctcaaattggtttaaccattgctgaattacaatttactgtaggtgctagaaagatgctcagagttaagagcactttctgctcttgcagaggactccagcttagtctttagtacacaggtctggtggctcacaatcacctataatttcagctgtagggtcttagcaagcctgcatgttcagaaaacccatatacaaacagacataattaaaaataaaaagtaaattaactctaccacacactatactgacttgccatttgaggtattattttataacattaaacgaaatctactcagaaagtgttttgctctatttcaaaatttgaaaaattaagttaggaacaagaaaaacagtatttggtaagaagtatatgtctaacatactatgtccatctttcagtattttatttattctttcagtgtaatgaaatgttttccctttgttccccctccccactctaccattctgtctcttttacattagaaacacaagtaaaaaagctcaagggtagacatataaatgacacatgttacacaaatgttctttaagaatatttattttgcatatatgggttattataagtagtacaccagatcctcagaaggttaccttttatttttttctatttaagccagtttttaacctaactaggaagtttctgataatgaaagtggaaaaaaaaaataaaaataaaagaggcttaccttagagttggaatatgtgctttgtttgtttgtttgtgtgtgggggggggcacatgcatgcatgtgtgctagtgtggttaatatctacaatttatcattttttatttattgatttctttctggaagaaattcatctcttcttaaccagaattatcaccttgttaatgactgcaaagcagagttcaatgctttatgatggagagttttttctgttaacattttttttttgttacacacacaatatatgcacatatacatgaagcaaataaacctaaatatgtattttatatattataatttgataaatacattaagtatttaaaaccaacccattgtttaaaagtgatatagaacttttcctttggaacgattttgatttttttctacatgggttatataaactgggtatcaagacgtcagtgatatttgaagaaacctatcttcccattaaatcttttttttaaacattttttattagatattttcttcatttacaattcaaatgctatcccaaaagtcccctatagcctccccctgcccccagtaaatcttttactctctatatccttccatataagttgtaggtgtagactatggtctggaactacacagtagttacagctttcatttgtatgtatatacccaatgtgttatataatatgttgggtactatagactcttttgcacagtgttccctcattcagtttccagagtaactctgttgaaatgaatatcactgtgtttattttgcatgtgagatttacttggccatatctcaaataatagaaatatgccccaaataactttgcttgttagggtcatttgtggtggtcatctagacagttttactaactgtctaactcatgtaagattttcttaaaggagtaatatttaagagaaagcaataaagggcagtctgaatttactatttaggtctataagggaacagataacttactttgctagcttgcttgtcatcatctacttgcgtaggaaaaccttacatctaggttttggcacactgtggtatttggctctcatggagggaaaatcattccactgtgtcctcacttttaaggtacctgttagaacttgctatacttgtttggcctttgtgggaggctgtatgcagcattctgtctggtggatatctttcctttggtttacttgagaggcctgccagattctgcccatggagagcagagtaatgggtgtcagacgattggggaaaaaaacatatttgcttgaatcaaatttctcacttgtcttgtgtttttacttctatcatttttttgtggtagtgggttacattattatacaatgaaacaagactgcctttactttcatttgtgtataatatttagttttttttattgaacatttttagaaggaaaatccaatggatctttaaaaaactttttattggttctttctgagtttcacatcatgcactccaaccccactcatctctcagtccctttgtacttaccctctgcccttgtcacctcctcctaaagaaaaacaaaacaaaaataaaatataaacaaaagaaaacaaagtttagaaaacatcttgtcatggacactgtagtgtgttacagtgtgtcccacaatatacacttctgtccacatgtttttgcttgcagatgtttatttcattgaatcattggtctgcttggaggctatcagtactggacactatcagtattggatcttcactggcactcctcttagatatcttgttattgccctgggttgtgagttcctgcagctttggatcagtaggactagcttattcacacactctagcagttcatctatgaggtagatgctggagtaggctaactcaaagccctggatctgggcattggtggtaggtgacttcctcagcttgacagctctcctgcatctgtaccactagggggagctgtccagcattacttgagcgagttcacacagtgctgccaatgacaaggggcagagtaagctcttaggttctcatgcccctgaacagctcatcttcaaccataggactagagacagctctactcttgtgctccgttcacccatctgcctaccacatacttatactttgtagtggctcccactgcaggaagaccatgttgctggtctctgggtgtcttcctctgcccatgccactggggcccctccctgttcctaagctaacctgtgtacaataaaccatttctgtaaataaatgctttgagtttcacatataagaaaaacagcctaaaatctgaaattagagttctgaaaaaatttagacaagggaatagaaaggaaagactttatgtatgttaacgatgtaatttcttttcctttctttttttgttttgttttgttttgttttgagacagggtttctctgtgtatccctggctgtcctggaactcactttgtagaccaggctggcctcgaactcagaaatccgcctgcctctgccacccgagtgctgggattaaaggcctgcgtcaccacgcccagcaacgatgtaatattttaatgcttcatgaaagtcagaaaatagtaaagagaactgaagaagatatgtttatttgttattacagcaggtttgtgtgtgttcgggtcctaaaaaagtaatttctatttatttgctatttagcttcctctcgcgttctctctctctctctctctctctctctctctctctctctctctctctctctccctcttcctttctctctgcctctctctcctcctccctccctcccccacccccccattaattatctgtagctgtccagcagccatggagaactgggtacacttgaaaggaaggctgggaatgaaatagcactgcgggcgagaaaagaatgaagccaagacaaagatttcttatcatggctcaaaatttcagctctgagtttttataggcaaaagccaaaaaccaatccctttgtttcagctggattctgttgctttgtttcagctagattgagttgcaaagtaaactcagtaagtggtcagctccttaaggctccataggaaatgcaaatgtggcaaggccaggccctgactccagctgcattgttaaaccagctgaagtttgtttagcctattcaaggctgggggaagggcacaattattccacatacctttcttatttcatagcttatattttcatcaagttgtgatcagtggcatatgattgtaatcctagcatttaggatgctgaggcaggagtatcacagattaaaggcaagcctgagacacagtgttagtttgtggttagcctggacttagagggatcctctcttggaaaacaacagtagcagtagcagcagcaactgcagcagcagcaactgcagcagcagcagcagcaacagcaacaacaacaataacaacaacaacaacaacaagaactaaaaaggcaacaacttagctttccctctctcttttagatataataaatttacagtggtttcctagtgacccaatttccagcagtgtcaggagacactgtataacaccaggtttccttaaggctaaaatttttaatcatcctcatagcaatagtgtgaatagaagattaagatgtaaagtcatattgtcgttccctgtaaattgttttaagcatggaatggcattggcatatctagttagaatttgtttctcaactcaagattatttacctgatcattgtgatacttccaaaggaatttgcgtgagtgtgtgtgtgtgtgtgtgtgtgtgcgcaattgcaatttatttgcataaaatgtgtttcttgttgtgtctttagtcttgatgatatttacacttaggaatttaggatatgagatttgtatatatgcacatcccactaagttttaaaatagcacataattacaatattttgtgaggtctttggatagagataattggtattaacattttttacttctgtttttttcctttttttaattagatattttctttatttacatttcaaatgtcatcccctttaatggtttcccctctgaaaatcccctatcccatccctctccccctgctcaccaacccaaccgctcccgtttccctttcctggcattcccttacactggggcattgaaccttcacaagaccaagtctctcctcccattgatgtccaacagggccacccaccctctgttacgtatgcagctggagccataggtccctacatgtgtactctttgtttggtgatttagtccctgggagctctggggatactactggttggttcacattgtttctcctatggggctacaagctccttcagctccttcgtcctttctctagctcctctattggggaccttgtgctcagtcaaatggttggctaagagtttccacctctgtatttgtcaggcgctgacagattctctcaggagacagctatatcaggctcctgttagcaagcacttgttggcatccacaatagtgtcttggtttggtgactgtatatgggatggatccccaggtggggcagtctctggatggtctttccttcagtctctgctctctgtatctcctcccatggtattctgttcccccttctaagaaggactgaagtacccacactttggtcttccttcttgagtttcatttgatctgaattatatcttggatattccgagcttttgggctaatatccacttctcagtgagtgtataccatgtatgttcttttgtgattgggttacctcactaaggatgatattttgtagttccatccacttgcctaagaatttcatgaagtcattgttttaaatagctgagtagtattcctttgtgtaaatgtaccatattttatgcatcctttcttctgttaaggaatatcttggttatttccagcttctggctattataaatgaggctgctatgaacattgtggagcatatgtccttattacatgttgtaacatcttctgggtatatgcccaggagtgatattgctggatcttccggtagtactatgtccagttttctgaggaaccaccaaactgatttccagagtgattgtatcagcttgcagtcccaccatgagtagagaagtgtttttctttcttcacatcctttcgtgcatctgttttgtttatttgtttgtttgtttttgagatagggtttctctgtgtaggtctggctgtcctggaattcactctgtagaccaggctggcctcaaactcagaaatcagcctgcctctgcctcccgggtgctaggattgaagccatgttcccacccagagcgagcatctgttgtaacttgagtttttgatcttagccattctgacaggagtgaggtggaatctcagggttgttttatttgcatttccctgatgactaaggatgttgaacatttctttaggtgattctcagctattcagtattcttcatttgagaattctttggttagctgtgtaccccattttttaaatagtgtcatttggttctctggagtctaacttcttgagttctttgtatatattggatattagccctctctcagaagtagggttggtaaagaactgttcccaatttgtcggttgtgattttgtcctattgacagtgtcctttgccttatagaagctttgtacttttatgaggtcccatttgtcaattcttgatcttagagcataagctattgttgttttgttcaggaaaatttcccctgtgcccatgtgcttgtgggtcttccccactttcttttctcttagtttcagtgtatttggttttatgtggaggtcacttgaacttgagctatgaacaaggagataagaatggatcaattcactttcttctacatgttgatcaccagttgaaccagcaccatttgttgaaaatgctgccttttttccactggatggttttagcccctttgtcaaagatcaagtgactgtgggttcatttctgggtcttcaattctattccattgatcaatctgcctgtcactgtatatatctgcctatcactgtatcaataccatgcagtttttgctctgtagtacagcttgaggtccgggatactgattccccaagaagttcttttattgttgataatagtttccactctcctgggtttttggttattccagataaatttgagaattactctctttctttctttctttttctttttttgaatgtctggtttattgaagaggctgtcagagccccaccacaaaggaggctgggagctgggaggctaagccaagcagggtggcactccagacaattgaaggtaaaaaaggaactcagctgaacacccagagcagcaataaggacaggctgcgcacaattggccaggccccatgaagcccagctccactaatggcatagaaccttgccacttcctctttggggttgccttgggctgggtctacccacatctgaatgcagcagctgctccctctgctgtagttgctgagcttgtaggagtggctccagatttcctcacacagagcagcaaatgtggggaagtaagactgtgaagggaaggcaggaggctcccacaggaagctcattatgctccgaggaccagttccttcccttgtgccagttgctcttgcaggtaaaagagctctggcagtcctcccaccactgctgacagtcctctttcacaggggaacgtcaaggatccgctctttgcaccagttctggtccacctactgtatccagggtctcaagttctgggaacactcatagaggcaggtgtcttggataaagtgccctttgcattccaatgtcatagttccgcagtggttccattcctctgttgagggacatctgggttctttccagcttctggctattataaataaggctgctatgaacatagtggagcatgtgtccttcttaccagttggaacatcttctggatatatgcccaggagaggtattgcgggatcctccggtagtactatgtccaattttctgaggaaccgccagactgatttccagagtggttatacaagcttgcaatcccaccaacaatggaggagcgttcctctttctccacatccttgccagcatctgctgtcacctgaattttttacctcagccattctggctggtgtgaggtggaatctcagggttgttttgatttgtatttccctgatgatgaaggatgctgaacatttttttcaggtgcttctcagccattcagtattgctcaggtgagaattctttgtttacctctgagccccattttttaatgggattatttgattttctggagtccaccttcttgagttttttatatatattggatattagtcccctatctgatttaggattgctaaagatcctttcccaatctgttggtggtctttttgtcttgttgacagtgtcttttgccttacagaggctttgcaattttatgaggtcccatttgtccattctcggatcttacagcacgagccattgatgttctattcaggaatttttcccctgtgcccatatcttccaggcttttccacactttctcctctataagtttcagtgtctggttttatgtggagttccttgatccacttagatttgaccttagtacatggagataggaatggatcaatttgcattcttctacatgataattgccagttgtgccagcaccatttgttgaaaatgctgtcttttttccactggatggttttagctcccttgtcaaagatcaagtgaccataggtgtgtgggttcatttctgggtcttcaattctattccattggtctacttgtctgtcgctataccagtacaatccagtttttatcacaattgctctctagtacagctttaggtcaggcatggtgattccaccagaggttcttttatccttgagaagagtttttgctatcctaggttttttgttattccagatgaatttgcagactgccctttctaattctttgaagaattgagttggaattttgatgggaattactttgaatctgtagattgcttttggcaagatagccatttttactatattgatcctgccaatccatgagcatgggagatcattccatcttctgagatcttctttaatttctttcttcagagacttgaagttcttatcatacagatctttcacttccttagttagagtcacgccaatgtattttatattatttgtgactattgagaagggtgttgtttccctaatttctttctcagcctgtttatcctttgtgtacagaaaggccattgacttgtttgagttaattttatatccagctacttcattgaagctgtttatcaggcttaggagttctctggtggaatttttagggtcacttatatatactatcatatcatctgcaaaaagtgatattttgacttcttcccttccaatttgtatccccttgatctcctttttttgtctaattgctctggctaggacttcaagtacaatgttgaataggtagggtgagagtggacagccttgtctagtccctgattttagtgggattgcttccagcttctcaccatttactttgatgttggctactggtttggtgtagattgcttttatcatgtttaggtatgggccttgaattcctgatctttccaagacttttatcatgaatgggtgttggattttgtcaaatgctttctcagcatctaaggagatgatcatgtggtttttgtctttgagtttgtttatatactggattatgttgatggatttccatatattgaaccatccctgcatccctgggatgaaatctacttggtcaggatgaatgattgttttgatgtgttcttggatttggttagagataattttattgagtatttttgcaacgatattcataagggcaattagtctgatgttctctatctttgttgggtcgttctatggtttaggtatcagagtaattgtggcttcatagaatgaattgggtagagtaccttctgtttctattttgtggattagtttgagaagaactggaattagattgtctttgaaggtctgatagaactctgtactaaacccatctggtcctgagctttttttttggttgggagactattgatgactgcttctatttctttaggggatataggactgtttaggccatttacctgatccttacttaactttgctacgtggtatctgcttagaaatttgtccatttcatccaggttttcctgttttgttgagtatagccttttgtaaaaggatctgatggtgttttggatttcttcaggatctgttgttatgtctcttttttcatttctgattttgttaattaggattttgtccctttgccctctagtgagtctggctaagggtttatctatcttgttgattattctcaaagaaccagctcctcaattggttgattctttgaatagttcttcttgtttccacttggttgattttgcccttgtgtttgattatttcctgctgtctactcctcttgggtgaatttgcttccttttgttctagagcttttaggtgtgttatcaagtggctagtgtgtgctctctctagtttctttttggaggcactcaaagctatgagttttcctcttagaaatgctttcactgtgtcccataagtttgggtatattgtggcttcattttcattaaactctaaaaagtctttaatttctttctttattccttccttgactaaggtattattgaggagaatgttgttcagtttccacatgaatgttggccttctattatttatgttgttattgaagatcagccttagtccatggtgatctgataggatgcatgggacaatttcaacatttttgtatctgttgaggcctgttttgtgaccaattatatggtcagtttttgagaaggtaccatgaggtgctgtaaagaagttatatccttttgttttagaataaaatgttctgtagatatctattaaatcaatttgtttcataacttctgttagtttccatgtgtctctgtttagtttctgtttccctgatctgtccattgatgcaagtggtgtgttgaagtctcccactattattgtgtgaggtgcaatgtgtgctttgagctttactaaagtgtctttaatgaatgtggctgcccttgcatttggagcatagatattcagaattgagagttcctcttggaagagtttacctttgatgtgtatgaagtacccctccttgtgttttttgataactttgggttagaagttgattttattcgatattagaatggctactccagcttgtttcttcagaccatttgcttggaaaattgttttccagcctttcattctgaggtagtgtttgtgtaagcagcaaaatgttgggtcctgtgttttgtagccagtctgttagtctttgtctttttattggggaattgagtccattgatattaagagatattaaggaaaagtaattgttgcttcatattatttttgttgttagagttggcattctgttcttgtggctgttttctttaggtttgttgaaggattacattcttgctttttctagggcgtagtttctgtccttttatttatttatttatttatttatttatttatttatttttttctgttattatcctttgaagggctggattcgtgaaaagataattgtgtgaattttttttgtcatggaatactttggtttctccatctatggtaattgagagtttggccgggtatagtagcctgggctggcatttgtgttttcttagtgtctgtataacatctgtccaggctcttctggctttcatagtctctggtgaaaagtctggagtaatcctaataggcccgcctttatatgttacttgacctttttcccttgctgcttttaatattttgtctgtatttagtgcatttgttgttctgattattatgtgtcgggagaaatttcttttctggttcagtctatttggagttctgtaggcttcttgtatgttcatgggcatctctttaggtttgggaagttttcttctataattttgttgaagatatttgttggccctttaagttgaaaatcttcattctcatctcctattatccgtaggtttggtcttctcattgtgtcctggatttcctggatgttttgagttaggatcttttcgcatttctgattttgttaattaggatactgtctttgtgccctctgattagtctgactaagtgtttatctatcttgttgagtttctcaatgaagcagctcctggttttgttgattcttttatttcagccctgagtttgattatttcctgctgtctactccttttgggtgtatttacttctttttgttctggagctttccagtatgctgttaaactactagtgtatgctctctccatattctttttggagtcactcagagctatgagttttcctcttagcattgctttcattgtgtcccatcagtttgggtatgttgtaccttcattttcattaaattctaaaacgtcttttttttttttttttttttttaggtttttgagacagggtttctctgtatagccctggctgttctggaactcactctgtagaccaggctggccttgaactcagaaatctgcctgcctctgcctcccaagtgctgggattaaaggcatgtgctaccacacccagctcagaagtctttattattttactttttccttgatcaagttatcattgagtgagcgttgttcagcttccatgtgcatgtgggctttctgttgtttttgttgctattgaagaccagccttaatccgtagtgacttgagaggaggcatgggattatttcagtcttcttatatctgttgaagtctgttttgtgaccgattatatggtcaatatttgagaaggtaccatgaggtgcagagaagaagatatattcttttgatttaggatgaagtgttctatagatatttgttaaatccatttggtccattacttctgttagtttcactgtgtctctgtttagtttctgtttccattatctgtccattgatgagagtggggtgttgaagtctcccattattattgtatgcggtgaaatgtgtgctttgagctttagtaatgtttctttaatgaatgtggatgcccttgtatatttggagcatagatgttcagaattgagagttcatcttggtagatttaacctttgatgagtaagtagtgtccctccttttctttttttgataactttaagttgaaagtggattatattagatattagaatggctcctctagcttgttcttgggactatttgcttggaaaattgttttccagccttttactctgaagtagtatctgtctttgtctctgaggtgggtttcctgtatgcagcaaaatgttgattcctgttttcatagcctgtctgttagtctctgtatttttattggggaattgagtcagttgatgttaagagatattatgaatagtgattgttgctttctgtttttttttttttttccactttcatctcgtttttagtttcttgatctatacctatacttcccaaatatatgtacacatatataagagataaaagcataccctatttatatatgtacacatatatatgagctagaatatggtatttgtgtgagcttggcttattttttttttttccattttttattaggtatttaactcatttacatttccaatgctataccaaaagtcccccatatccacccacccccactcccctgcccacccactccccctttttggccctggtgttcccctgtactggggcatataaagtttgcaagtccaatgggcctctctttccagtgatggccgactaggccatcttttgatatatatgcagctagagtcaagagctccggggtactggttatttcataatgttgttccacctatagggttgcagatccctttagctccttggctactttctctagctcctccattgggagccctatgatccatccattagctgactgtgagcatccacttctgtgtttgctaggccccggcatagtctcacaagagacagctacatctgggtcctttcaataaaatcttgctagtgtatgcaatggtgtcagcgtttggatgctgattatggggtggatccctggatatggcagtctctacatggtccatcctttcatctcagctccaaactttggctctgtaactccttccatgggtgtgttttttttttttaatgttatttttatgtttgtgtggttatcttcttccagtttgttgaaaaattactttcttgctttttctaggttgtagtttccttcctttcttgtgttggtgttttccatctattatcctttgtagggattgatttatggaaagatacggtgtaaatttggttttgtcatggaatatcttggtttctccacccatggtaattgagagatttgctgggtatagtagcctgggctggcatttgttttctcttatggtttgtatgacacctgcccaggatgttctagctttcatagtctctgttgagaagtcttgtgtaattctgatacgtctgcctttatatgttacttgacctttttcccttactgcttttaatattctttctttgttttgtgtattttatgttttgattattatgtgacaggtggaatttcttttctggtccaatctattatttggagttctgtaggcttcttgtatgttcatgggcatctttttctttcggctaaggaagttttcttgtataattttgttgatatttactggctctttaagttgggaattttcactctcttctatacctattctctccttaggtttggtcttctcattgtgtcctagattttatgaatgttttgggttaggatctttttgcattttgcattttgcatttcctttgactgttgtgtcaatgttttcgatggaatcttctgttcctgagattctctcttctatctcttgtattctgttggtgatgcttacatctatgactcctgatctctttcgtagattttctgtttctagggttgtctccctttgtgatttctttattgtttctatttccctttttatatcttaaatggttttgttcagttccttctcctgttttgttgtgttttcctgtaattcctttagggatttttgtgtttcctctttcaagtctcctatctgtttacttgtgttctcttgtatttctttcttttttttaaacatattttaagatttatttatttatttattatatataagtatactgtaactgtcttcagactctccagaagagggagtcagatctcattagggttggttgtgagccaccatgtggttgatggggtttaaactcaggaccttcagaagagcagtaagtgctcttaaccactgagctatctctccagccctctctcgtatttctttaatggagttgtttatgtctttctttcttttttttttccatttttattaggtatttagctcatttacatttccaatgctaaccaaaagtcccccatacccatccacccccactcccctgcccacccactccccctttttggccctggcgttcccctgtactggggcatataaagtttgcgtgcccaatgggcctctctttccagtgatggccgactaggccatcttttgatacatatgcagctagagtcaagagctccggggtactggttagttcataatgttgttccacctatagggttgcagatccctttagctccttgggtactttctctagctcctccattgggagccctgtgatccatccattagctgactgtgagcatccacttctgtgtttgctaggccccggcatagtctcacaagagacagctacatctgggtcctttcgataaaatcttgctagtgtatgcaatggtgtcagcgtttggatgctgattatggggtggatccctggatatggcagtctctacatggtccatcctttcatctcagctccaaactttgtctctgtaactccttccatgggtgttttgttcccacttctaaggaggggcattcttaaagtcctctatcgttgtcatgagatgtgatttttaaatcagtgtcttccttttctggtgtgttgggatagccagggctcactgtgctggaagtactgggttctgatgatgcaaagtagccttaatttctgtttcttatgtttttacccttgccttttgccatctgttccctctggtgctgctggtcttgttgtgtctgactgtcgcttgtctgtcctgcaaccctgtgtgtcagtactcctgcgagaacaattttctcctggaggaatttaggtatggagatctgtggtacagggtcagctcttgggtgcagacagaaacagtaggatcctgtctccagctgttccttggttgctttttccttatgtctctgggcaggtccctcttgggtcaggaatttgaagagaagtggtggttttacctgtgctcacaggtgtgtaggcactcctgggagaccacctctttcctggcagtatttgtgtatgtagctctgtctcacaggatcagctctgggcacagacctctcaccaggtagctcctcggttcttgtgtcctgaatgttctgggcaggttcctctgagcaacagtggtggtcctactagtggtcctacttgtgctcataggcctgtccgaactcgtaggaggcttgctctctccaggtgctatttggctatggaaccctgtggcagaggattgcctccagttgcagatggaaactggaatacttctgtcccagtccactcctaggttcctgtgtcctgagagttccaggggtttcctctgagcagcagtggtgatcctatgctcacaggtttgtctgcacttctggaaggatagctctttcctagcacctcctgggtatggagccctgtggccagttttaacatttttgtaaaacttattttcatgttaaggtaccagctctagtgtaactaggatttcatagacctctggtgataggagtgagccgaaatctcaacccattttaaatctttacacatctaaggatagatatgtttttttaacactagtctgtatattaccagtgagaattataaatcttatcctctgtttctattgtattgggacaaaaccctttatttcacattttgactaggtcattcttttgcaaaacaccttggattggtgcctctttttgggactcccaagtctgtatttttctaagtaagccagagccagcctttctatttgttcatctcttaagggtcaagtcggggaaaaagagctgatttaaacagtgtgctaattctatgtaatgcttttctttcaggacaaggatagtgggttgatttgaaaattgtctccagagttctagaatatcaacttacctaaccattggtcactcaaaagcttgtcttataaagttcagtgcatgaagctgtagtaaaaatcatttaaaccccaatataggacttgtgcctgccttgatcatttagttctcagataaaagatacacatagcctttatattctcaatgtgcattaagcagcataatagctgggcagctgcctaccctccatgttgttagaatctatttccccattgataacccaagttattacttattgtgtttcatctgtgctgctcttagctccaattgggcagccctcagggccatgctttcctctctttcaacccatggctgctcctttcttcctcctgcacattcttctttcattccatggtggcgtcttctccctcttcctcctcaggtattctctgcttcaagcccactaagcacaactccacctatgtccctctgccaagttatcgatattgacatctttatttacaaatcacaattaactggggtgtcttgcatgcagactctcttttctttggggtaacctgatttaggagccccaaattagtattagaatataagcagcattagaccaacccactacagcgaggttctcatttatgaaagcagtataataatttctgtatattatctatactttttgttttgagaatatttttgaattatgaaatcatttcaggatatgctactggtttcctcctcctaaatagaggttctcaataaaagcagactcattacagtgctatgttaactggcagtatgcctatggctggacccatgaaggtctggaacaatttactgctctcctttatagatatggaggtactcacttttccagaagagagacagcaagatctagctcatgactctttgctatgtgactggcaatttgcctattattgtgcatgagccaggttgttactgttaaaattgcagtttgctgatcttggaggagtatattctgttcaatctgcttgttactgatcttttaaactatgtaactccatgcttcaaagaagatggtgtagaaaaggaagccagggtcctaagtactcagagtggttctcctgtctctgcagaaggtcatttccagctagctgtgactattcaagaataagatccagtgttcctaggtgccttcaacatcatgaatgctaactattcagggatgtatgtgtattgtcccaatttcttcatgttcacattgtaagactctggggagccttagcttactggggaccccctgagtgaaccacatggagctgaaattgatgcaaaaagcaagaggaatttattgttccagtgcactggggttgtcccagaccccaaggagaggcagagaccccccagcaccagttcagcgagtttttatatggttcccaagggtagaacagagcatcagcaactaggcacactatgattggcggaacagtgcgccctttaaactgattggtctttagggaatgaggtgacaaggtattcctttgtcagaaggtgagccaaggtcagtcttgcaaaatgtgtccctaccttcaggtccattcctgccctgtggtcagagaaatgctaattagcctcttccgaaggggtgagtgtttcatgaccttcccaaagttcctatgctgacctattcaacatcaagttcaaatggagcaaaaatcaaaagtgaaacacttatctgctgtctctcttatgctttcagagctttaaggtgctttctcaggtcttaccctagtttttggaattcttggcctgtaaacattgctatatttgtaatcatgacagagtaaaacccttgttccaacatttaaaataaaaatttgagctcataatataatcacataattttcctctatccaaacattcccatatagccatgttctttctaatttatggacttttttcccactaattattgttacatatggcaataaaccaaaatttttttctgtagtgagaattttacataatttacacatttcttaagtattgttatacttaaaattattgaaataatgagtcatggtgatcaaaacctttaaaaagtgcaactgataaatggattacatgcctataatgatacaaaaatagatagtaaattactagtattgtgatctcataagctttgacttctgttttgccatctctaatatggtagtatttatactacttatatttgtacttatattagtttgtttctcattgcacagagaagtgtctggggggaggccttaaggaaggtttcattatggcctactgtttgaagagatataatctgtcatggtatggaaggcagggtgatgggaccatgtagtgaattgcttctacagtcaggaatcagaggtaaattctggtgtttggctgacctcctattttgggtctttttattcagtctggaaccctattccatgggatggtgacttgcatattgagagtagtattcccttttctgctaaacctcgctggaaacatcctttggttacacccaaagatgaggcccaggcagttcaaatctagtcaggttcaatgtgaagataaactatcatgattcctttagaagtcaccataatatttacattaagttataggatgaaaaatgtttttaaaaataggaataaattattgcttattaaagagttttgttcaagtcaggcatagtgacatatttctattgtctcaacctgtgagggatctgaggcagaacacttgtgttcagaatttcaaggcaaacctaggcaattaaatgagactctgtctctttaaaataacaatgatggcaacaacaacaacaaaaacaaaaccagttcatcatagactgattgcctttatctatctgaatattagttacatagacacagaatgagttcacaaagatgccactttaatggctctgtggtatactctgcttcttaggaaggtctggatggagacagtcattcattgttccagaaaaagttatgaacttggggtgaatgagtctgtttgaggtaaactgaagtgaaaccagatattcaggaaatgtcgagtagagttgtgattctcaaagtttggtttcttagcaattagcagcagtacccaaaagactgctgtgtatctgtgtatattctttgcttacctcaactctctgaactatggggaggagtcctatggagtgctcacaaaaagggacctagcataactgcactctgacccagcaagcacctgaatgagtcagatgcagatatttgcacccaacccatggacagaaacagctgacctctgttgttgaattagggaaggctgaaagaaactgaggactctgtaggaggaccagcagtctcagttagtctggatccctgagatctatccaacacagaaccaccaaacagacagtatacaccagctgatatgaggctcttaacacacatacagtagaggactgccaggtctgtgttcattcatgatgtacctaaccctctagagactggaggccccagggagtttagaggtcaggtggggtgggggttggggacatccacgtgaagacagggggttggggaggaggtatgggatgtggaacagtagcggggctggagggagaggaataaaatatggagtgtaaaaaaataaattaataaaaaaaagaataaaatttaaaaaatatctgatcctttaaactacacttacatatcagactgaaaggaataaaattcaattaaaaaacaaacaaacaaacaaaccaagatctgtgggtgattgttgagaattagtctgctgctatgtattataatgctaaattctgtatgggggtggggggtgtctagttgcctctagtgaattctcactctgccagcttttgttgtgcaaaccttcctccttaatttaaaactattggttgaataaagatgcctacagcctgtatctgggcagaagggggtagacagggtttcagttcctggggctaggattctgaggagagaccagttggggagagccagagaggaggaagaaggaagaataatccagggaggaggtggattgtgagagcctgtctgtgagaccaacctgttggaataggagtggcccaggtggaacatnnnnnnnnnnnnnnnnnnnnttggaataggagtggcccaggtggaacatggcaagatatattttggctttatcgacagagaagtagacaaagtaccacagaagcttgatatctgcccagccctggtgctttttaaggcttattataaatataaagggtttttttgtttgtttgtttggtttttttttttttttttgtcttttatttgagaaccaaatgatctaagctgggatagaaattcccaaattatatttaccgcaacaggtgattatgtttcttgagaattactaggtaaacgaccatgctaaagatcaggaatgtagatgataggactggctggagacaacaagttaagtgaaatgcagggcactgaaggcaggataccagcaagagttgtattttagttgacttcatttgtcccagataacataccttttgtatatcatgaaagccaggagcaaaggacacttagctcccaggaaaatgttgtatattcctggatctctctatgcggcatgtcctttgatataagtcctagagtaaccacagggcctacagaacagtgtttgggagcagaggcatgggtgcaggaacctgttatatagggatacagggcactatgcatttttctacatgtgaatgaggcatactcctttaactgaatacaagaaatggcctgagcagtacagagtgagaggttctttctgagctttaagttgcatcaggttgaagtcctgcaatgataggtgttgtggtgaatattatttggggaattctaccctatctaatatcatttagttcccaaataaaagacactaaacctttatatttataataagccttaaagcaatagagctgggcagatagcaaccctttatgctattttgtctacttccctgtcaataactcagagattatcatttgtcatgttctgcctggactgctcctactccaatagcctggtccttacggccatgtgctcacaatccacctacctcatggtggcttctttcacctcctctctcttctcctctcttgtggttcctgtctcagataccaagctcaggaactgaagcctcacctacatctcttctaccataccacaggctgtagacatttttattaaccaatcatggataacttggaaggcaaggcttatacaacaaaaactggtatatatgaggctctgctcatcttggagcaaccagactttgacacacagaatttagcatttgaataaaagcagcaacagaacaacccactacagatgggaatgtgcacagggtcaaaatgtcccattctgttctgttgcagtgtcactggttagatgtcatgtttgattagactcttctgtgccctttggctaaggcttctctgtatagtatatttctctggtagagtgcctagagtcagccttatcttaaaaatatttcccattgacctttgattactcatatttacttgccaggtgagccaacttcttagcattcttataatggactttgtgtatccaacaggaaatgtatgggatttttactggagattgattctggggccatatttgttctaagatatactaccgccagacggtagtggcacacacctttaatcccagcacttgggaggcagaggcaggcagatttctgagttcgaggccagcctggtctacaaagtgagttccaggacagccagggctatacagagaaaccctgtctcgaaaatacaaaaaaaaaaaaaaagatatactaccactgagatttatctcccagctggaacttgtgttataagtacattggcatcatgcttttctgaggtgaacacaaagaagagaaatacacagtctttgcttttattactctaacaaagtattatcctttaagaaatcagacatttggttattggtgcattttattcattttgcctagaacagaacctgtgtcacttgaaactgactttaaccaattctaaactctcagatgacttgtcctatcctggaaatcaagccaaagttgtaaggagggtgtttcctctagctttcttggttcctttgcttggatgacacacagcagctcttatgtttagatgtgtagctccatattcctcatttgataagtatttgaaaatatgtttaatatgctccaagtgtttgatgatgacatggaaagtatacatcttaccaagtccatttggtgttccatcaagcagtgagaacttcattcacatgccccttatagatagtattttcccagttttccatctaatataaatgaaaatataaattttttggtcttattttcttactttatgcttcttttgttctatgtttttgatatctaaaagaagaaatttcttttttcttttttagaatcttttttccatttatatacttttttttttttggaatcctaagtgtaacttaaatgttaaataaattgatttgaatttatttagttactattatttaaacagttacttcattctcaattagaccagggtagatggcctagtttattaacgtttcttcttctaggtaaagaaagacaaaagattataagaatgagtaaaagagcagaactggagcatatattggattgtgggtatgctgcttagttttttgtcaatctgacaaaaaattgagggaatttcaattgagaaaaggcctcaatcatattggcctaataggcaagtctattgagtactttcatgaattaatgattaatgttggatgatgccacccctgggcaggaggtcttgtgttgtacaagaaagcaggccaagtaaaccagtaagcaacattcctcttggccttgttttagtttctatcttcagattcttacttgagttcctgctctgacttcctttcatgatagagtatcatgggatatgtaacctaaataaggtgctttctctccaagttgcctttagtcatggtgagttttttggggggttggggggtgagggtgggatggggcgtgttaggacaggatttttttgtgtagccttggctttctgggaacttgatatgtaccttccaagtactgggattaaaggtatgtgctgccacatccagatttgattattgagttgtattacagcaatacaacacaaattaggacagtaggcaaaagaagttgtttagcttcccatgtttacaccttaagatgctatgggatattgttagggagagggagagggagtcacagaggtacatatcttacatggtaaagagggagaggtaaaatgcaagtgttaagaacagtagatgccagaacaagttaggtagacttgtcagaacaagaagagattgtggatgaggtcagtgagcagagtctttgtggactttttgggcagaatgtatctgcttgagcagggaactgagcagagactttaggttgggtcaggaagtaaaggatccctgattctgagaatgtgatagtggcatgagattagttggtgtgtttgaggtgttgagtttgagccctgggcgagagaatactactaactgagccctgagataaggcatgttatagctctacctggagagaacatggaactcagtattgggatctttctctctctaggaatgtataggatggtgcaagtgggcataaagacataaagaaagaaaacagcaagaggtcacatcaggggaccagttatttctgatgatcttgttttagaaatgaggactacctgagaatgaagaggaagattgaattattaatatttatcatcagtgaaggaatttcagttccatttgatataaaaagaaaacaataaattacaaataaaatgcccacttgatggctgaaatcctagagtactctctactaggtagtatggcagagatcttagataacgaaagttattaattttttattttgtcatgtgaaattgatatataaatatgtctcagtataaatgtctctggcacatttgcaaagataaatggattaaaactaaaagaaataaaggcatagatgtaagaattacctataatttttgtggttatatcacttcttttcttcccctcctcctctttttttttttttttttttggatattgttttgttttgtttttatttttttgttttttttgagacaagctctctttacatagccatggatgtcgttgaactcactatgtagaccagtctggactcaaatcccactcaggggtagaggagtcgacctcgaggggaaaggggccttagtttttataggccctcagctgggaaaggagaaggggggaattggggatttccagatctaaacaatgtctattctcaagaaatgggtatgggaggggtacaaggaaagagtctggtgcaggtgtagcaactccggattggcccagctgttgttgctggggagattttctgactcttagcaaccaatatcacaaacacctggcagtgaggtgtagcagtgggcacacacctgggttcaaggaacggtcagaacattggcagacacatggattcaaggagtgtccagagcattgtgcacctctatttttctaaatcagtgaagctacttctactaacaatgaaatctattttgccaatttcagggcttctgtgacctattacattctgtcaggatctttcaaagtcacagagatctggctgcctctgcctcttgaatagtgaaattaaaggtcatttgtgtgtatgtgtgtgtgtgtgtgtatgtctgttttgcttaactgtggtagtgaattctacgtgactataacatacccactttctactatgtgtagaaagatttgttgtcttgagttcagtgtagtttactactgtaattatatttttttatatctcacatttggttttcatctacagtggatatgacctaatcccgtgagcctttaggtgtgtgtctagtagtcaggaaatgagagactgaaaataaaactggagttgatactctgtagatggtgcgaggatgaaggaggccccaccatatatgaccgtttcagagcatagagcagacctagcaattagccagtaaattaatgggacttatgtcctattatgccaaagctggccttggaatttggatcattctctagagtctgtgaaggagagctaagcccaatgaatagtttgatatcagttttgtggaatgctgagcagaggaaccactaaagtgaatctcattcctaactacatttcttttttcttttgatttttcgagacagggtttctctgtataggcttggctgtcctgggactcactctgtagaccaggctggccttgaactcagaaatccatctgcctctgcctcccaagtgctgcgattaaaggcgtgcaccaccacacccggcatcctaactacttttctttaagcctttaagtttgtatgaattagccccagctgtagaaaaattaatacagagcttataaacaactgttgaaatgtatagactgcgccttctgtccatacgtccacctgcactctcagaggatttacatgcaagcttccctactccacaacccagcctgactctcaaggaggactgctctaaccagagacacagtgacaaagaaagtctattccaaacaaagtcacaatagacctgctctaaacagagacacagctctgcatgcttcccagaaggcctgctctaacctaggacacaccattctgcctgcctcctgggatacctgctttaattcatgaaacacaggccagctaacaccagagaaaaccagatggtgaaaagcaagcatcagagcataatcaacagaagccaatgcaatatggccccataagaacccagttttcctactactgcaagccctggatattttgacacacctgaagggcaagattctgacctaaattctttctcatgaaggtggtaatggaggcttttatagggaataaaaacaatttctttaaagaactacaggaaaacataatcaaacaggtgaatgtaatgaacaaaatagtacaagacctaaaaatggaaatagaaacaaaaaagaaagtacaaatggagtcaaccctggagatggaaaacctaggaaagaaaccagtaactacagacataaacatcaccaacagaatgcaagagatggaagagagaatctgagacataaaagataaccatagaaaaaattaatatgttggtcaaagaaaatgccaagtgtaaaaagtccaaaacattcaagaaatttgggacagaaggaatagaagaggatgaagattcccagttgaaagggccagaaaacatcttcaacaaaatcatagatgaaaatttccctaacctaaagaaagagatatctgtaagtgcacaagaacacgaaataggttggattagaaaagaaaatatactgccacataataatcaaagcactaaatgtacagaacaaagaaagaatcttaaaagctgcaagggaaaaagataagcaacatataaaggcagaactatcagaattatacctgacttctaagcacagctaaactaactctaacatctagaagattttggacagatgtcttgaagactcttagaagactatagatatcagcccagactactatatccagtaagactctcaatcaccatagaaggaaaaaccaagatattccatgacaaaaccaaatttaaacaatatctttctactaatctagccctacagaggatactagaaggaaactcaacacaaggagggtaacacccaagaaaacataagaaatttatctcacaacaaacccaaaagaagagaatcacacccatatcaatgacaaaataacagtaacgaacagttattgctcattgatatttctcaacatcagtggatttagttcaccagtaaaactatacaggctaaaagactgggaatgtaaataggatccatcattctgctgcatacaagaaacataccttggaaaaaaagatagatagaatctcagagtaaaggtctcaaaaaaggtttttccaaggcaacaattccaagaaacaagctggagtagtcattctaatatctaataaaatagactttcaatcaaaagtaatcaaaagagattgggaaggatacttcatactcatcaaaggaaaaatccaccaagatgaagtctcaattctgaacatatatatgcttcaaattcaaatgcacccacattcataaaagaaacttcacgaaagctcaaaacacacattgaaccccacacaatgatagtgggagacttcaacacaccactcttacgaatagaccagtcattgaaacagaaactaaacagagacatagtgaaactaacaaaaagtatgaatcaaatggatttaacagatacctatagaaccttttaccccaaacaaaagaatctatattcttctcagcatctcatagaaccttctccaaaactaccatataattaaccatgaaacagatctcaccgtatacaagaagattgaaattaccctttcattctatcagatcaacatggactaaggctgaatttcaacaacagaaacaacagaaagtccatatgttggaaactgaacaactctctactcaatgataagttggtcatggaagaaacaaagaaaaaaaattaaaactttctagaattcaatgaaaatgaaggcgtaacatacccaaacttatgggacacactgaaaacagggttaagaggaaattcatagcaccaagtgccttcataaagaaactggagagatctcatattaacaacttcacagcacatttgagagctgtagaacaaaaagaaacagacacaccctagagcagtagaatgcaggacgtagtcaaactcagggctaaaatcaaccaattagaaacaaagagaggggttggggatttagctcagtggtagagcgcttgcctagcaagcgcaaggccctgggttcggtcctcagctctgggaaaaaaaaaaaaaatagaaacaaagagaataattcaaagagtcaacaaaatcaagagctgcttctttcaaaaagtcaacaagactgatgaacccttacccaaagtaactaaaaggtaaagagacagtatccaaattaacaaaatcagaagtgaaaagggagacataacaacaaaacctaaggaaattcaaaaaactatcaggtcttaattcaaaagcctagagttggcaaaactggaaaatctagctgaaatggatgattttatagacaaatactacaggacaaagttaaatcaagatcagacatactgtctaaacagtctcctaacccccaaggaactagaagcagtcattaaaaaaatttcccaactaacaaaagcccaggaccaaattgctttagtgcagaattctaccagactttcaaagaagaggtaataccaatactcctcaaattattcctcaaaatagagtcagaagaaacactatgtattccattctatgaggccacactcaacatgatatataaaccatactaagacccaacaaagaaagagaacttcagattagtttcacttatgaacacctatacaaaaatactcaagaaaattctcacaaactcagtccaagaacacatcaaaaacataattcaccatgatcaagtaggcttaatcccaagatgcacagatggttcaatatatgaatatccatcaatatatatacaaactcataggaaaaaaatcaaatgatcatctcattaggtgctgaaaaaggcttcagtgacacccaacagcccttcatgttaaaaatcttggagagatgaggaactcaaggtacatatctaaacgcaatcaaagcaatatacagcaagccaataaccgacatcaaattatatggagagaaacttgaagcaatcccattaagatctgagtcaagacaaggctgcccactttctccctatccaatatagtacttgaagttctagttagagctataagaaaacaaaaaagagatcaagggtatacaaataggaaaggaagaagtcaagttattattatttgctgatgatatgatagtatgcataaacaactcccaaaattctaccagataactcttagagctgataaccactttcagcaaattggctggatataaaattaactcaaacaaataaacaaaaatcagtagcatttctttatacaaatgataaataggctgagaaagaaattcaggaaacaacacccttcacaatagctacaagtaatataaaatatcttggggtaactcttaccaagcaagtggaagatttgtatgacaagaacttcaagaccataaagaaagaactcaaagaaaacctcagaagatggaaagatctttggtgctcatggatccataggattaacattgtcaaaatggctgccttactaaaagcaatctacagattcaatccaattcccatcaatattccaacacaattttttacagaccttcaaagagcaattctcaactttagcaattctgaaaaagaaggactcatcatccctgaccctaagctgtactacagagcaataaaaacctcatggtatcggtacagaaccagacaggttgattaatgggatagacgataaaaataaatccacacacctgtggacagttgatttgtgccaaaaaagccaaaaccatactgtgggagaaagaaagcatctttaataaatggtgttagtctaactggcagtctgcatgtggaagaatgcaaattgatcaatatttatcactcttcccaaagctcaagtccaagtggatcaaagacctcaacataaaactggatacactgaaagtaatagaaaagaaagtgagaaatagccttgaacacattagcacaagagcaaatttcctgaacagaacaccaatagcttatgctctaagatcaacaattaataaattggaccttataaactgaaaatgttttgtatgccaaaggatactgtcaatggaacaaaagggtagcctatagattgggaaaagatcttcactaaccttgtatgtgactgagggctaatatacaaaatatataaagaactcaagaaattagactctaaaaatcaaacaacccagttaaaacattgggtacagagctaaacagtcctcaacagaggaatatagagtggttgagaagcactcaaagaaatgttcaacatctttaggaaatcaaaacgactctgagcttccatctgacaccaattggaatggaataaaaaactcaagtgatagcacatgttggcaaggatgtagagaaagaggaacactctcccattgctggtggaattgcaaactggtacaaccactctggaaatcaatctgacagtttttcagataatttgaaatagttctacctgaagatccagttatcctactgctaaataattttatatacctaaaatgtactccactacagcacaagaatacatagctctctatattcacaataggcttattcataatgtccagaaactggaaacaaccctgatgtctctcaaccaaagaatggattcagaaatgtggtttacttacagaatggaatacaattcagctattaaaaacaaggacatgaatcttgcaggcaaatggatggaactagaaaataatcatcctgagtgaggtaacccagatccaaaatgccatgtactcagttataagtggatattaatcaaagagttcagaatatccatgatataacccatagacccaaagaagttaaaccagaaggaaggccctgagtgaggatgcttagaaggaacaaaatagtcatgggagacatagaaagcaagaggcctgggtgggagaggggaagggaagtaggcaggatcagttgtggggagagacagaagagagcctcagagggccaggagaataaatggaaatatgtagcgatgggaggcagggttggggaggatctctagaaagtcccagagacctgagatgggtcaggctcccaggactcaatgtggttgaccttagccaaaatgcccatccgttgagatatggaacctgaagagaccacatccagtagtagctagacagaacctataaaacttttgactccaaatttttcctgtctaaaaaaaatatagggacaaaaatggagcagaggctgaaggaatgggccaccattgacatagccaacctgggatccatcccatgggtggggcaccaatccctgacactgttactgatgctatgttgtgcttgcagataggagcctagcatatcagccctctgaaaggcttcacccagcagctaactgagacagatgcaggtactcacagccaagcattggatagaggtcggggacctctatggaagagttaggggaagaattgaaggaattgaaggggatggaaacctcacaggagaaccaacagtgttgtcaacgaatctcaaactgtgggagctcccagagattgggccaccaaccaaagagcatacatgggctggtcaaaggcttttggcaagtcctgcctcagtgggagaggctgtgcctaatcctataaagacttggtcccccagggtggggggatacctggggagggcacattctcagaggtgaaggatagggcagatggagagggggcaatatttaggatataaattaataaaataagtaattaattaaagaaaggagagtataggtagtatgggtggctgtgcatctcacagtcttagtaggaacatgggtatatacaaagggaagtaccttaatgatcacctctgttgtcttttccccactcatcccctgtactttcatagcacgtaacacacgaagactggtatcacatctaggagatacatggtattcagcaagtcttttcaaatgatacaggttatggagtatctacagacgaaggggctagaaatagctattagattttgaaaccttataatgaaaggatgatagctgtatcccaaagaaatgacaggtagggtttttgttttgtttttgtttgttgttgttttgttttgttttgactagtgtacagttcctaggcacatggaaatacagtttcagtgaactagccacatatcatatagagattggaaacttaggcaagagagtttggtgctgggtttacagctgaacaggatgtttgtttcaggacgttttaagttaaacatgattaagattcttagtggtaggagcaagtcatcgagagtatccttcccctctgtctctttcagttggtatcattatcagattttttttttccccaaaaaatatttgtataagaaatagagctgcagataggtagctgcttcttaatagaatgaggtttatgtagacatgattcgacttgtggtttgtccttacataatcaaagtgcacggttgaggttttatatttataattaacgataatctgaacttattgaatgttttagctatatttgagacattagtttcttcagtattttcttaagtgcttgaaactgattctccctcttcacttcttcatctcagaaactgcaattttgtttttgtgacgaacaacttcctgttgtgcgttctctccagccacttctgggttgagtgctgtgtgttttttacctaaggctgtaagtgcattgcaacactaactggctatttcatcatgatttggattgagaaagtctatcaggaagtcacaagtgaattgtccccaacatagcttttagcttcatgtttctcagttgctgtgtcatgataggcagttggtattccgactagcagttgtaaaaagggcacaagaggataatttagagattaagcgatggcttcattgtatcatttgattatggtcactggagggtcggtttctgtatgtgacatgtaggaaggaagaagcctcatggctcgtctcctggggcagaaggaactgcttcaatttctctgtcagcctcagaaatgattgcaagtgtagctcctcactgtccttcagaagttcccccaggtctcctaaaacctgaggaaaaggtatgttgtcaaaaaaagatttgtccttgccactgtttaaataaattagatgaggagttttcagtaagtgatatgttgaagattattcattatgtattttcccagtagatttctttctccagggtagaaatatagttaagcagatacataaaatacaagtcagactgtccaggacctcacagtttgaaaaatagttgtaatacaaataaatgtattaatgaaatggtagtaatatgtgctggtgaccatcagtgggttaagaaagcccttataatagatgcgcctacagcaagtataggaagccctccctaccgctgaatctcagtgtactgcctaggttctcagctgcaaagtctacccagaatgttccagttggagaaaggaatgctaaatgaaaggcacttgaactaatcccaggcccagagctggggtttagtgatgtggcctgcacagccacacccctttcctcatgcttgtattgacgaggagttgtcagggtaacacttcaggtagaagaaccatgtttgtgtaagaaagtcaccatgtttgcccacctgccacatgccttgttttctttctttataaaacgataaactgcaccttcccttacctgaaaaaaatatgtatttaaaaaaaataatcacatttatatgaaaatttatagattaaatttatattaaattgctaatatttatttgaaaagtggagattttgtgtgtgtaacttccactcagagtgcattaaattattttatgatgcaaatgaagttttacctgacagtgaggagaattggacacacatattagtaaatagcctccttttctcacagtgtggaggtgacaggcattcagaggatttgcagtttcagggtttcaaagttgtcagtagccttggtagttggttttcgttttgcaggtatagcagagcctttcactgtatccttggccagatggagccagtgatttttctgtaggaaagaaggtcagcatactgttgctgatttgcaaatcaagaagacttttaattttaatgtcccaaaacatgattttttaatatatttgtgaaatgtattcacatttgattacattgaaattctggcttaatatccatcttttagaattctaaattaatacaataaatcagaaaggggatggtcttcagatataagtgtactccgggcacaagttaggagaaattagtcttggcaagtacctgcttttcaaagtgctgttgccagctctggtgatcagatatttattactgtttgttttttgtttgtttttgttttttctttttttttttcttttccattttttattaggtatttagctcatttacatttccaatgctataccaaaagtcccccatagccacccacccccactcccctacccacccactccccctttttggccctggcgttcccctgtactggggcatataaagtttgcgtgtccaatgggcctctctttccagtgatggccgactaggccatcttttgatacatatgcagctagagtcaagagctccggggtactggttagttcataatgttgttccacctatatagggttgcagatccctttagctccttgggtactttctctagctcctccattgggagccctgtgatccattcattagctgactgtgagcatccacttctgtgtttgctaggccccggcatagtctcacaagagacagctacatctgggtcctttcgataaaatcttgctagtgtgcgcaatggtgtcagcgtttggatgctgattatggggtggatccctggatatggcagtctctacatggtccatcctttcatctcagcttggggttgtactaaatgtatgttgtgctagtggatactgtgttagtcagtttttaatttgaaccaagacgtttcagtggtacagctgtttgtaggtcacgcatgtgactgcaactgacctctttttactcaactattcagcatgccagacttgacagaatcactctgtcttcagctttttcctgttatgggagaataaacttattcctcccaggaaagtcatgaagcagattcctgctgagggccaacttctatgacccagaaccgcctttgtaacccatttcatgattctaccacagtctgtgtatcaagactttaacaactgtggttttggaggacacttaccaagtcatacaaatactgaactaaaatttaaaatttattcatacttctgacttaagaggttgaactttagttgttaatatttttatttatttatttatttatttttattagatttttttaatttacgtttcaaatgttatcccctttcctggtgtcccctccaaaaacccctgatcctctccctcctccccctgctccccaacctacccactcctgcttcctggccctggcattcccctatactggggcatagaaccttcacaagaccaagggcctctcctccctttgatgaccacctaggccattctgtgctacatacgcagctagagccatgagtcacaccatgtgttttctttgattggtggcttggtccctgggagcttttagggtactggttagtttatattgttgctcctcctatggaactgcaaaccccttcagctccttgggtactttctctagctccttcattgtggaccctgtgctctgtccaatggatggctgtgagtatccacttctgtatttgtcaggcactagcagagcctctcaggagacagctatatcaggctgctgtcagcaagctcttgttggcatccacagtagtgcctgcatttggtggttgtttatgggatggatccccaagtgggtcagtctctggatggtcattccttccatcttagctctgaactttgtctctgtaattccttctgtaagtagtttgttcccccttctaataaggatcgaagtatccatactctggtcttccttctttttgagtttcatgttttgcaaattgtatcttgagtatttcgagcttctgggttaatatccacttatcagggagtgcataccttgtgtgttcttttgtgattgggttacctcactcaggatgatatcctccagatctatccatttgccactgaattacatgaattcattgtttttaatagctgagtagtacttcattgtgtaaatgtaccacatattctgtatccattcctctgttgagggacatctggattctttccagcttctggctattataaataaggctgctatgaacattgtggagcatgtgtccttattacagggtggatcatcttctgggtatatgcccaggagtgatattgctggatcctccattagtactatgtccagttttctgaggaaccaccaaactgatttccagagtggttgtaccagcttgtaatcccaccagcaatggagtagtgttcctctttctccacatactcaccagcatctgctatcacctgagtttttgatcttagccatctgactggtgtgaggtagaatctcagggttgttttgatctgggttatgagaattttattgagtgttttcacattgatattcataagggaaatatgaaattttttgttgtgtctttttgtgggttaggtatcagagtaattgttgcttcaaagaacgaattgggtagagtaccttctgtttctttttttttttttgtaatagtttgaagagtattggtattaggtcttctctgaaggtcggaaagaactctgcactaaacccatcttgtcctgggcttttttttggctgggagactattaatgactttttaattactataggggatatggaactgtttagatcattaatctgatcctgattaactttggtacttggtatctgtctagaaagtttccatttcatccaggtattccagttttgttgagtataggttttttagcaggatctggtaatattttggatttcctcagtttctgttgttatgatttcatttctgattttgttaattaggatactgtccctgtgccctctagttagtctggccaagggtttatctattttgttgattttctcaaagaaccagctcctgctttggttgattctttgtatagttctttttatttccacttggttgatttcagccctgaatttgattatttcctgccatctactcctctttggtgaatttgcttctttttgttctagagctttcaggtgtgctgtcaagttgcttatgtatgttctctccagtttctttttggaggcactcagagctatgagttttcctcttagggctgcttacatatcagtttgggcatgttgtggcttcattttcattaaactctaaaaagtctttgatgtccttctttatttcttccttgaccaagttatcattgagtagagtgttgttcaggtctcatgtgtctgtgggctttctattatgttgttattgaagatcagccttaccctgtggtgacctgataggatgcatgggattatttcagtcttcttgtatctgttgaggcctgtttgtgactgattatatggtcaattttggagaaggtaccatgaagaagttactgagaagaaggtatatccttttgttttaggataaaatgttctgtagatacctgttaaatccattcatttcacaacttctgttaatttctctgtgtctctgtttagagtatgattccatgacctgtccattgatgagagtggggtgttgaagtctcccgctattattgtttggggtgcaaatggtgctttgagctttagtaaagttcctttaatgaatgtggatgcccttgcatttggtgcataaatattcagaattgagagtttatcttggtagattttaccttcaatgagtatgaagtgtccctccttgtcttttttgataagttttggttgaacgtcaattttatttgatatgactactccagcttctttcttgggaccatttgcttggaaaattgttttctagccttttattctgaggtagtgtctgtctttgtcactgaagtgggttttctgtttgcagctaaatgttggatcctgtttacataatcagtctgttggtctatgtctttcttttgggggaattgagtccattggtattaagagatattaaggaaaattaattgttgcttcctgttatttttgttgttagtgatgggattctgttcatgtggctatcttcttttagtttttttgaaagattactttcttgctttccctagggcatagtttccctccttgtgttggagttttcccttaattattttttgaagggttggatttgtgcaaagatactgtgtaaatttggttttgtcgtggaatatcttggtttctccatctatggtaattcagagttttgctgggtatagtagtctggcctggcatttgtgttcctttaggggctatatgacatctgcccaggattctctggctttcatagtctatggcagtaagtctggtgtaattctggtaggtctgcctttatatgttatttgaccttttccccctccttcttttaatattctttttttgttttgtgtatttggtgttttgattattatgtgacaggaggaatttctcttctggtccacactatttaaagttttgtaggtttcttgtatgttcatgtttatctctttctttaggttagggaagttttcttttataattttattaaagatatgtactggcccttcaagttgggaatcttcactcatgtctacctgttatccttaggtcttctcattgtgtcctggatgttttgaattaggagatttttgcattttgcatttttttgattgttgtgtccatgttttctgtgatattttctgcacctgagattctgtcttctatctattgtattctgttggtcatgtttgaatctatggctcctgatttctttcctaggttttcaatctccagagttgtctcctttgtgatttctttattgtttctactttcatttttagatcttgcatggttttgttcaattcctttacctgtttggttgtgttttcctgtaattctttaagggatttttgtgtttcctccttaagagcttctagtgtttacctgtatttctttaagggagttatttcgtcctttttttttttttttttggtttttcaagacagggtttttctgtatagccctggctgtcctggaactcactctgtagaccaggctggcctcaaactcagaaatccgcctgcctctgcctcccgaatgctgggactaaaggcgtgcgccaccacgcccggctttatatctatatatctatatgtcttgaagagtagtccatgcatgctggtttctataaaggatgacactgaaatttttattttaattaatataaaattaattacacaatacattgcgagtctgttcttcctactcttgcccctacctcctcccacgtttacccccattctcctaccctcttccaatttgtttgcttgttttttataatctgcctatgctgatttatgctgcccatatactccaggtcagtcacaagaaccatggtcagtctatcatgacctagtataggagacccacccctataaatacctattcttcctctcccaaaagccatcaacttttcagtgttttctcagaggtagggactcaggagcccctttcacctccatgcttgaatgttgactgacttggtgttctgccagccttgtttaggcaaaccagttgatgtgaatttatgaatgctatggccctttcaagacagcctgttttaagaagggggaacactgttttgctctggtgctctctgacctcttgcctttttgttctatatgagtatttgcgtgtgtgcgtgtgtttgtgtgtgtctgtgtgattggtgctctttgtggcctaggcttgccacaaaataatctaggaataagtctaatcaggaagctgagagacttctttatgagaacttcaaattttaagagagattgaagaacacattagagcatgagaagatgggggctggcaagatggctcagtgggtaagagctctgactgctcttccaaaggtcctgggttcaattctcagcaatcacatggtgggtcacaaccacccctaatgagatctgacaccctcttctggtgcatctgaagtcacctacagtgtacttatgtataataataaataaatcttaaaaaaaaaacagaacatgagaagatgttcatagctcatggattggtagaattattgtagaaatgaccatcttaccaaacttataaatcaatgcagtaccaaaatatctcaacattattcttcacagaaactgaaaaagttcctaaaattcataagaaacctcagataatccagatagctattgtgtttctgaacaaaaagaataatgttgtaggtattaccataccaactttcatgctatgttacaaaactattgtaatataactgtataatgctggcaaaaacagacatgccaatctatggagcaaaaccaaaggcccatgtgtgatgtcttagttagggttactgttgctgtgttagattaccatgacccaagcaacttggagagagtgtttttattagtcttatgcttccttatcattcttcataactaaagaaattcaggacaacaactaaagcacagtatgaatctggaggcaagagctaacttagaggtcatggaggggtgtttcttactgacttgctccccatgccttgcttcatcttctttcttatagaacccaggaccaccagcccaggatggtactacccataatggtacttcccatcaatcactaattaagaaatggccctacaggcctgcctaaaacttgatcttatggagacattttctctttctttttttaaaaaaaagatttatttatttatttatttatttatttatttatttatttatttaatgtatatgagtatgctgtagctgtcttcagacacagtagaagaagacatcagatcccactgcaaatggttgtgagctactatgtggttgctgggaattgaactcagtacctctggaaaagcagccagtgctcttaactgctgaaccacctctttagctccaatggaggcattttcttaattgaagttccctctcacatgatgttgtgtctggccagtagatcacaacctgggttttagcctggaaaggcattttggaaacctggaagagaagaggggctgggctgtgcgagataaggaagaaaccaagacaaagctctctgctcaaggtttaatttttactattttggcactcagttataaaggaaggaggaggggcccaatttctgccaaataatctcggaatccagtagcagggtgagcacatgtgtggctctaaacagcaaagctgcacggtctggcattgggtgtggcagaacgaatgagtaggaagctccacccctgagcaagcaggtttcaggctgggggaggagagactacaacatgacttcagcttctgccaggttgacattaaattaacaaacacatatgacttatgtgactatatgaaatcaccacatatcaaagatgtaaaaggttcccagcgcctccactgtgagagggaacagcttcaatcagtggttctccacatgtagaataattaaattaaactcatctttgccattttacaaacatcaatcctgaatgccttaaagatttcaacatgaaacctgaaaatgctagaagaaatcatagttgttacctcatgaggaaaggataggactctatttgcccatgtattaatggtaccaattgacgaaacagaaactcttaaactaaaaacttctgtacagataaggaaacaatcaactaagtatagaggaagctcatagatgggagagggtctttgccagctatagattttatagagaattaatatccagaatatataaagaacaaaagccaaagaattttttaaagacctattcaaaacgtgggctgtagcgtcaaacggagagttatcaagaaaaaaataaagaagaaaagagaaacatatctcaaaaaatgtttatctgccatagaatcccaatggctatagtcaagaaaacaaccaataataaatgtttgtgagaatatgggcaaaggaaccttcatgcagccactctgaaaactagtgtggagaattttttttaaatatttttatttatttatttattttaattaggtattttcttcatttacatattcaaagaaaagaaaggaaaggaaaggaaagcaaaggaaaggaaaggaaaggaaaagaaaagaaacccctcaaaaaaatatctacaatgtgacccacacacgttataccttcccatacggtcaaaagactctctttattccacattctgctcagccatgttgatggcttctctattataatagctaggaaatagaaacaatctagatctccccaaactgatgagtggataataaacatgtgatacatatacagagtgtattgatattcatatataaaaaatagaaatagaattttcatgtaagtgcactgagaaaacatttctaaaagatgagctctggataaaacagccgctgcctgggagagtttcttgtattttattgtgttcatgcatagagagatcttctgtcttcttcagatgatgtggatgtaagagggctggctacccgctgttttcccacagtccttcattgtgctttggttctcttatgtatgtgatgagtacatgatttctttggttggctaagacaatgtcattttgattgtcactgaagacattacttactaaattttttattgtcctttattgtatgaaatgtctgctaaaattgagaaaaaactttataaaaataaatataaaatacctaatcttccactggggctaataaatatggctaacatttcctaagtatttaatattgtattattgtctttctagtttgaagattaagaaacaaagcatagttaaattctttgccttatggtagtcactcgcagcaggtcaaggctgggactttatcagagtcaaacaccagttatgtgtgggaagactctctagactgttaacatatagtgatctttcttccctgttcttgtttcttctctctacagactgtatttggaattgttcacaaggtgttgtgtgattttagtttatttcctcctcttcaattttcaaatttactgtgaacaaaacaaaatgagagttggaggatattttttgtattaattacgcagtcatgatagtgtgtggatagcaggcattcattgtattctaatttataatttacttttcatttaacaattgacagcctaaaacataagtaagttaattacggattgatgcctagaaattctaaaacactactcatctcctgttaataattactgttaagttctttgctgaggaaattcatgtggattgtatgatttgtctttaaaattatcccactcattgtgcaatgctgaggaatgcctttttgtggaatctttttttaatcattgaaagcaaatgaaatagatatgagcttcctaagaggattagcaaatttgcttttcttttttctctctctctctttttaacttcatctccaaattattcttcagagcacattgtcatcagttctcccgtattgtgtataggtttaaatgcaaggccttcccaggagctgcttttttctgccccttcccggctacctcgtgcaccttccagcctagctctgggatcagaacagccacttctttcctacctgcctttgctcctggaagggtcaggttgccagcgcctaggccatagaatgcaggatagaagacacacacactgctcctggaagggtcaggttgccagcccctaggccatagaatgcaggataaaagacacacacactgcacccttacctttagaacttgctcctaggcacaaacgttggtcctagatacttcctgcccggaaatgggtgcccttataaatttattacctccatctctacctctgccttaaacttaatggcttacatcagctagcacccccccccccacacacacacacatctttggcccccacccataggggaggctacaggctctagctgccccaagaccttacatgactgctgctttctacttgttgcaaagcgtggcaaaaaagcccctctctctttccctgcatctccttttcctcttaggagctaaaagtcccacctgtgccaccatccagcaattggcccccagtcttctttattgataagtcaagaaacaattgtggaacaagaccttagggacagaacctccccttacactaccgggttttgtatacccatgcaatctctcttttgtcagatcaaaaccattttttttcctgtcttccctgtcacagcttaaatgtttttattatgcttaagttgttagcttggctcttctcaattgtatgtcctttccatggacagtcttctctaactcttttctacacattgttcctattctatggattcttaaaggtatgtcttctaccgaagccactctagtaatccagtggcatggaactgtcatatgagggtcagtctagttctaagtattccacacatcatagtcaaactaattgttaagaactacccctccacacttaagttctggagtcttccttctgcataaatgcaacttcattcactttatgctcacagttgatgcctggcatcttctttgactccatgcttagctctcatttctactgtgagtcctctatgtacttgcaccattttgttggttttctcttaagtccttctgttcccaatgcactcaatcctcttgtggcttgctctgagtatccttttcagtatgttggcataagtcctgtgctcttccatgtcacagtctattattcagaatattggcttgatgatccttccacatcaacatctgatgttagctcctgcttaaaaagctgatggttctctgctgcctcagagcaaagctgtagccactccccagtcttgtaaacattcacatagccacatctctgctactctgtgtgtttccctgcctgtcttgtgttcccccaaatcacactgctctttttccttagaatgggctttctccctcctctcaggtgttaacattcagcattctattcaatcctagagagggagttgttgttggtggtaattggttgctttaattcatgttggttgctatagtctccctgacaaagagatgaataataaattagatatcctgaaagcaaagatcaaacttgcctcaatgaacttgatgctctagtcagcaggatatggtctaacgatattatcccctttcctgcccctgatatttttggggattttcttttctctcttttcttaattcttttttctcctcttcctagttttggggggctgaaaggggggaaagaagaggggtggacaaggattgaagaaaaaagatcccacacataactccagtgtactttgaatcctcttcacatttgcttttgagtctgtggcacaagctgtgtccctttctaggacagacagtacttttggttccaggaagcagtaggctatgtatgtctgggcatgttctgattgtcattactgattggacatgtactactctcctctgatagatgttggcaggggctgttactaaacactccacagtgcatattttcctaacttcaactggcaatagaactaactgaggttgagagatcttgctttaggatgaagtgaaaaccttcattctaaagaaaaattctcagccattcctagggtgtaggcctaaaatttcagctactcagaggttagactggaggattatatagttcatagtacacctgggctatgaacatttttttaaatagaagcaatgtacagaatatagctaagaggtatagaatcctacgttcaatccccatggggcttggtggggatgtctcataagaaaagacataaaattattttttaagccgggcgtggtggcgcacgcctttaatcccagcacttgggaggcagaggcaggcggatttctgagttcgaggccagcctggtctacagagtgagttccaggacagccagggctatacagagaaactctgtctcaaaaaaaaaaaaaaaaaaaaaaaaaaaaaaaaaaaaaaaaaaggaaggaaggaaaaaagaaaaaacatttttttttttaatttatctatatcccaaacactgctcccgctcctgctccctccctcagagagtccctcctcagattccccctctacctcccttctaagaggtggagccccctttgggtatctctttaccctggcacatcaagtctttgccagattaagcacctctcccactgagtccagacaaggcagacatagagactgtgttgcatgtctgctacatatatgccagggacctcgttccaccctgtgtatattctttggttggtggctcagtctctgatagcacccaagggtccaggttatttactctgttggtcttccggtagggttccctccccttcagggccttcaattcttcccccatcttttccataggtgtccatgacctttgtccaatgtttgcctgtgggtatctgcatctgtttcagtctgctgcagggtacagcctttcagaggacatttatgctcagccactgtctgcaagcataatagagtatcattaataatgtcagggatttggtgctcacccattaggtgggtttcaagttgtgcaagttctttcagttggcctttccttcagtctctgctccatccctacatttcttttagacagggcaaattttgggtggaaagttttgtggttgggttggtgttcttatacctcctttgggggtcctacctagttataggagttgacctcttcaagttctatgtcctcactgttaggcattttgcctaaggtcacttgcattgactcctgggggcctcccccatcccaggtctctgggactgcctagagatttcccccatcccctacccctggcagatgtagattttcattcattttcctgtttctgtggccctctttcttgactatccccatacctggttctccccccatccctctcaattccctctgcctccttttgagtattttatttctccttctgagattcaagcatccttccttgggccttccttctggtttaacttctttgggtctttgtgctgtactttctggctaatatccacttatcttcgaggacataccatgcttgtccttttgggtatgggttacctcactctggatgttattttctagtttgatacatgcctataaaatgcctataaaattcatgatgtccttggttttaatagctgagtagtattctgttatgtaaatgaaccacgttttctgtatccattctttgtttgagggacatctgtgttgtttccagtttctggctattatgaataaaacttcaaatgagcatagtggatcatgtgtccttgtgatatactggaatatcttttgggtatatgcccaggagcaggataactgggtcttcagatagaaccatttccaattttctcaggaactgccagatttatttctagagtgattgtataggcttgtactcctaccagcaatggaggagtgttcttctttctacacattcttgccagcatatgctgtcacttgagtctttgctcttaaccattctgattgatgtaaggtggaatctcagggtcattgtgatttacatttccctgatgactaaggatgttaaaccttttttaggtgcttctcagccattcaagattcctcttttgagaattctctatttagctctgtaccccatttttaaattagattatttgggttgttggagtttaacttcttgggttctttatatattttggatactagccctctgtcagatgtagggttagtaaagatcttttcccaatttgtagactgcccctttgctctattgacagtgtcctttgccttatagaagcttttcagcttcatgaggccccatttttgttgttgatcttagggcctgaatcatttatgttctgtttaacaaattgtcttctgtatcaatgagttcaaggctatttcacattttcttttgtattagctttagtatttcaatttttttgttgaggtctttgatacacttgaactggagttttgtgctggaagatcaatttgcatccttctacattcagacatccagttagaccaccataatttgttgaaaatacttcctttttttctattgtatggttttggcggctttgtcaaaactcaagtgtccccaggtgtgtgtgtgtttatttcaggatctttgcttttattccattaatcaatctgtctgtctctgtaccaataccatgtacttttatcattattgctctgtaggtgcagtttgaggtcatgaatagtgagtgattcctccctaagttcttttattgttcaggattgtttggctatcctggatttttttgttttgtttttccatatgaggttgagaattgttttttttttttgatgtttgtaaaaaattgtgttcgaattttgatggagattacactaaatctgtggattgatttggtaagatggccatttccactatgttaatcctaccaatcgataagctttagagaccttttcattttctgaggacttctttgatttcattcttcagggatttaaagtcttgtcatctaggtctttcacttgcttgggtagagttacttaaagatattttatagtatttgtagctattgtgaaggttttttgccccctgatttctttcctggcctgtttatcatttgtataaaggaaggttcctgatttgcttactgatgttacttaacagctgtaggagttctcaggtagaattttggggactacttaggtatactatcatatcatcggtgcatagtgatcccgtgacttcttcctttctaatttgtatcctcttgatcttctttttaaatagtaattttattttataaattcagcaatttgagtaagacagggaagaaatattttaagaaattttaagcagttacattttaagtaattcctatttttgttaaaaatttctaactggtttctaaaaaatatattggagttgtgccagaaaaggcaagttttcttatttactcttagtccctcctttgctgaattaaaatgctttatacttaaagagacaatatatttagtttgtgactaaagtgaatgttatctcttgattaaaacttcatttaattaaatattagaatgtctattccagcttgtttcttgggtccagttgcttggaaactcttttccagctctttcctctgagataatgtctgtctttgttgctgaggtgtgttttgcgtgcaacagaatgatggagcttgtttactcatccatagcctgtgtctttttattagggaattgagaccatgttgagagatattaatgaacaatgattgttagttcctgttattttgatgttggtggtcgtactttgtgtttgtgtgttggatttgttgtggaattatctgttccatgtgttagaattttccttctagtatcctctgtagaactggaataatgaaagatattgtttaatttttttttattggaatatcatgttttctctgtctttcaaagttttgctgggtatagccttccaagctggcccctgttatttcttagagactgtaagacatctatctgttcaggcccttctggctattaaagtcttggttgaaaagttaggcataattatgataggcttgttacttgacctttttcccttgcagcttttaatattatttctttgttctatacatttagtgttttgattattatgtggcaggacaattttcttttttggtccatctatttggtggtctgtatactccttttatggttataggcatctcttactttaggttagggaaattttcttctgtgattttattcaaaatattttctaggcctttgaaatgagagtcttctctttgttctattattcttaagtttggtctttttctagtgtcccaaatttcctgagtattttgtattagaaatgtttagctttagcattttctttgactatgtatcaatttcttctatggtatcttctacacctgagattctgtccttcatttcttgtactctgttggtaatgcctctgtctgtagttgctgttctcttttctaggtttttcatctctaggattgcctcagtttgtgttttatttattgcttctatttccatttttacgtcttgaacagttttattaatttctttcacctgtttgattgtatttccctgtttttctttaaagtctttattcatttcccctttaaagtcctctatcatcttcataagattagatttaaggtcatttttattgcaataaaaatggtgtgttagtatattcatggcttggtgtagtaggatagatgggttttggtggtgccatattgccttggctttcgttgtttgtgttcttccactggcctttagccatagattgtccctggtgttggcaggaaggcatgttcatccctgatgggaataggcctgtggggctgcacatagagctggttgtccttgatataagcaggcctttaggatttcaggtagagctgtttgtccctggtggtagcaggcttccagggatgcagacagagctggtagattctgatgacattaggctgcttgttgacctgggttgggacaggcctccaggggtgcaagtagagggatgcaatgttgatccctaatgattacaggcttctctttgtcctgggcagcagcaggactccaggaatataagtgaagttgttgccctggagtcaagtgcagtaggggcagggtggagttatcagttgctgtagttgtcaagcttgaccaacaggcaggggttggggggggattctattaaaacttcaaagttaagtcatcttttcggcagttccgcttgtttacctttttgagttctgtggactgtatcttgggtattctgtactttttaaatttttggctaatatccacttattagtaagtacataccatgcatgtcgttttatgtttgagttacctcactcaggatgatattttctagttccatccatttgcctgcaaaagtcaagatgtcctcattcttaatagctgagtagtattccattgtgtaaatgaaccacattttctgtatccattcttctgtcgtgggacatctaggttgtttccagcttctggctatcacaaataaggctactatgaacacagtggaacaggtgcccctgtgacatggtagggcatcttttgggtatattcccaagagtggtatagctgggtcttcaagtacattgatttccaattttctgaggatacctcagttccacttgggaaagagaaggaagcaatcataagtgagtggggagggagggagggacctgggtgggaaaatggacagagaggggcagtggaggagagagaggggaatctgatctggtattgggtgagggaaaaggactgaagccctgagggccagcagaaagaatggaaacaggcaacctcatgaaataggaggttggggggacccttcagaatgcaccagagacctgggaggtgagagactctcaggattcaaagggagagaccttagatgaaattcccaacagtagggagagggaactaatagagctcacctccagcagggagacaggatatcaagagagggatggggttgctttcccacagccacaactctgacccataattgtttttgcctgaaagaattacagggattggaaatggagaggagcctgaggaaaagaaggtccagcgacaggcccaaagtgggatccagctcaaggggaggtcccaaggccagacatgattactgaggctatggagcgctcataaaaggggacttagcgtgtctgccctcagaaagacccaacaagcagctgaaagagtcagatgcagatatttgcatccaaccaatggacagaagcagctgactcctgttgttgatttagggaaggcttaaagaagctgaggagaaggcaatcctatagaaggacctgcagtctcaattaatctggtcccctgagatctctcaaacactggaccaccaaataggcagcatataccagctgatatgaggcccccaacactcatacagtagaggacttctgggtctgtgttcatacagagatgatgcacctaaccctcaagagactggaggccccagggagtttagaggtcaggtgggttgggagttggggacatccatgtgcagacaggggagtggggaggaggtatgggatgtggaacagttggagggtggatgggggggaataaaatatggaatctaaaaaagtaaattaattaaaaaatttaaaaataatattaaaaaaaaaaggaagtcatcttttcccattgcctatcagaaagtacccactcctaggctttcaggtagtggtactggattactgttgtgactcgtgtggtggcacatactgctcgcctgctaaatgaagataaaagcagacttgtgctgattttgagagtctataaaataatccctgtcttagaactagttttatctattcctctcttcatctttgagtattaaagggctttttgtcaacagtgatcgacatatttgcatgtgggcttacatgaagaatacttaattgtatgtctcttaatttttccagccaatttctacagaaattttggagtattcatcagatagtgaaaaagaagaagacccagaacattccctgttcattgattcagaatcccctcacaaataccaggcggattttaaatctgatgcaagatggtgtttggttagtcagactgactcagaagcaaattcagctgagcctacattgacaccccagaaatatacggtcaagtttccgaagactccagaatattcagtaacaaagaagaagcttttaaggttagatcaacttttaaatttcctattcctctgttcatgtctttctttaaaatattaactgcgattttaattttaaaatacttttttaattgagaaagaaaattgacaatataaaattctgatttttgatatgcaagcctattcaggaaccagtttacgaaattgttcattcaattggaacatttatgaatttagacatggctagcttgcatgactactttccttagtagaaatgtgttgtttggtttgtcaagttttattatatatcagtgttgtaggtgctatgtttgaaagtagagacagatgaatcactgtttccttatcaaatataactcataaaataagcataagtcctttagcttatctttatggcatgaatgtggttagagagattggccagaataatgcttacaaatacaagaaaatataagacccttgtttgaaggataaaaacacctcatggctgaggagagccatagtggggaaaaaatccttgttactggtttatcagtgagagactagcctttgttcccaagcaggatatgtgagggagcatttagagacatgttccaactttatgtcaaatggtatgtttgtgtgttatatattggaataaaataatgtccctttccccaaaacaaaataacgaaagtgagaaagaaccagtgtcaagcagcacagtgccttatactacaagcaacagagagttcctagagaatggatcacagtagaaagaggacacatgtggagggctgggggtgaaagcaagaaagaacctgtgccaagtagcaccatatcttatgcccagaagtagcagagagttgctaggagaatggatcacagtaggaagaaaatatgtgcagagagtgtgggtgtctattaatatttccacagcaaactgggagtaattgactaaagagtggttgaaacacagggcagactgaatccaaaacttacactctccatggagagtcgtaattgttatgtcttgaaagggctctagtctctagagtagtcatagagaatatttccagagacagataatgagattggcgctttatgttgaacaaattaatatttattctcatgttgttttttaaaataaggcacaaggttatgtactcattctagataaaccacttcctggtatccaaaaaccttgggcagtgtcatgagaccaaagaagaatgaagattagacagagtttaattagtgacttagtggtagaaatttggttgtatacagctggaagaccagtagatttctgggatttcagtcaaaggaagaaggcttattaaatggtcaagacaaaagtgacctcattcaggtcatcatagatgtggcctgtatgagtctgttatcagagacatcagacatattcctgatgcagatgggtccattcaaaagctaaacatactactcttatggtttgtattgcattgggaaacactgcaagtgaaactcctccagtattactactcagtggtcattgtgactcaagatagtcagttatgccaatctgaatccatcaatgccccaaatgaagttattgcttcagaagagaaagatagttggacattataatgcacacttacaatcacaccacagactgtagaattatagttcaagacaagcctgggtgacaaggtggatttgaactcagattagagtggtacatagatctcatctcaaaaattcaagaactaggaatctaaatcagtgatagaatctttgtctaacatgtttaaaaggctctgggttcagctaccaggaagggaggagggaatgggaaagatattgtgcttgaaattaaaattattttaatgctacaggtgacgttacttaattccagaacatcgtattcccaaccctgttgaggatcttttctatgatgagtatgcttttatatgtagaagacacaacagcctttgaaacctctgcctgttctaggtagactgattgtcagccaagaagtataaagtagtgttaaaagtgggatagtaggaacagcaagttttggatgggaagtggttggttaagcacttttgggttaagctactagataatggtaggctcttagacttgaattaatggaggccaggagcctgcccggcatggaaggggcctaagggggcacagaggtggcttaccatgcctgctctttctgttctctctacagcttcttctttgtctccttttctctctgcattctgcacattactcttttaaaattttaagttcccttataatttctaagttattctactctgctgtccttctccttcctcttgctaatcttgctctctcctcctgcttggatataataaatgccctacaatgtaatcctctataggttctttgtacctagttttttctaggggagtagatcacatgatttctccaagaatccttttttgttgttgttttgttttatttaataaaagttcactaagtgtttaaacataaattcaaaccataaattgaataagaagtttacaacaaagaatgtttacattatgtatccaataagactagacattcattatttgtcattagctctacaggttcatggagaattaaacaccataactaagttatcactgaagtttcatatagataaacctagtcaatattctgtcttctgtacttgcaccaacaataaattgttagtttctttttatgatctttggttaattattttgtaacctcttggaatgtgttcttagttgtaaatgcctgctttctatctcagaagcaattaactcgtgatacttgaagactggcagggtcctcattgcagttttaatatcagagaggacttaatagcagtcctattataaagggctaaatagttactagcattattttaggaattagagaatcatcattaagaattaagaaatcatctatttgtctatatagcatcaccacaagacagtacatcttcattgttcttcagaacaatacctagtgatatatatattcaatcataacaggaaaagcatattagtaacaggaatttttcctcagatgtaacctcttcagacataacctagaggagcaaatccgtcatgactttgcagtccatagtgaaacaatctcaggaagatcacctgctagcttttaccttctcatagatggctcctggcaagagacaccttgtaaatttcagatttttaaaaaataacttactattttttttattttatgtgcattgatgttttgcctgcacataggtcttggatcctggagttacaggtggttgtgagcttgtcacgtggatgttgggagttaaactcagagcctccggaacagcagttagtgtttttaacctataagccatctctccagcccataaatttcaaatttagaattgactgtgggatggatagatgaggtgggtagatgaaatagagggaagccactcaggatacctgcagatttccctctctttccctgttcctttcccttcttccccttgccttcttttctttttctttttttttaagtgttaaatgctctttatttgatatcatacataaaccacagtaaatgcctttcaatagtaaaaggcagcatccttgatgtagggaattctaattaaaactgcactgttgagaatagacagttgcctcctggtggttagccatgacctgtaagaggccagtgaacacaaactgaaacacatttgagtcttcttgtttctgagacagtgatagaattttcccagtgtttaagcatattcatatgcccagttatataaatctaagtataaaaccatttagtaggtttaaggcgacatgcccctatttatggaaagtaaaacattactaatcaagtcccatcttatcttgagaaagggagagccgtggtagcatgtatacaactggaactgttgctttaataaagaccgtacccactttatgacaagtcagttttacttaaatcaggactgtccaacaagaacattgctagccattcatgatctgaatttggtgtatgaattaaattatagtgtacattaaaagccatgagacatttgttttgtaataaataaggcagtggaattactcattagtagcctttttaagataagctattaggtctgccctttctcccttcttcttaattccagcgaagatcatttttgttccagggatgtactttttgggattctccaaatactccatcagggtatcctctccccaggtgatgcctctgttcttgttggcatctgtgtaagagaatccagcagcctggcctatcttccccccgaacagaccatggagatttggtccagtcttatgcttgcctcccttttccacagtgtgacaccgggcacacttctgaacaaaaattttcttgcctttttcaacatcacacatttttaattcgctctgggttgtcaacaccgcgaacgttcggactcgaagacagacatcccgcgctctacgccttttcttgctttgcctttttcatcctgttttttcttactttattttttaataaactaaattatcttaaggagttcaaattatattcttgccgggcagtggtggcgcacgcctttaatcccaacatttgggaggcagaggcaggcggatttctgagttcaaggccagcctggtctacaaagtgggttctaggacagccagggctatacagagaaaccctgtctcgaaaaaaaccaaaaaaacaaaaaaattatattcttgtttgattattgggtccatcaactgattgacaagttcattcttgtctatagatctgaagattgcttttatgtatttgcatgtttggagtccctatttgcatgacagaatggggcattttctaacctgagctaagtagtaactgcaggcagtaagtgtattacacacttagtagtgaacaaattaagagaatatagaatgagaaccaaactgacttaactgttagactgtgagtaaaatagcagtgcagcttttatatgaaagataataaaccttctaagaaaactagaaattggaaatgatatccagaaagagagcataatacagaagatgttaacatttcccatgttcatctgtttctgaagaggggctgtaaagtataagagctatagctttcttgaaggcttttgtttttatttaaacatagaattttataatccattaaacaggggcgggctagcagaaagactccaagaactgcagaatcgaaagagatctgccatttctttgtggagacatcgatgtgtttcttaccaaatgacaccattaggtaagatttacacctgcttctaaaatgatgggtacaaaacattagagctaaaatatctttttgtacattaaaatacatgaaggtgattgttagtgtttttgtgactcaaaaaaattctccctgatagttttgtttaagtggggaggggtacttttcagtatataatttaaatctcttttggtggggcatggggctggacgagttggtaaagagcttgctgtgcaagcttgaagatgtaagtgcaaattttcagcatgcacctggaaagacggatgtggcattgtgtacctgcaatcccagctctggggagatagagacaggattcatgcctgtcagtcgagccaaatgtgtgagcttctggttcagtgaaaggtaccaactcacaaacatggcacatacacacacacacatacacacagagagagagagagagagagaaaaatatctttaccaggataaagttttttcagttgtttaaacatttgcaaaagccacacattcttcttcagttttattgtaaaatagctggaagaacatttagtatatatacaccagaaaacaaatgttttcagtatagaaaaggcaatttaacttataagatgacctgatatatgaatgcctacccagcaatgaaagaggtcaccaggctgagcctggtggtggtggcgcacacctgtaatttcagcacttgggaagtagaaaagcaggtggatctctgagttaagaccagcttggtctacagagttctaggacagccagcactatgtagaaaaaccctgtctggaaaagcagatacaaacaacaaaccaaaccaaaacaacaacagcaacaaaaacaaagcacacaaaaaacaaaaaaacaaaaaaataggttaccaatctggacagttcagcaaatgtcatactcagatgactaaaacttgtcaaaactgatagtataatacaaaaggtgttaacatttttcagttcagtccaaactgaatcattgttctccagtaattcagggttcattttgcacagctgatgccctttgctgggaacactgttaccatctcacccctcagaagcacctcccactcataagctacttatcatgtcttctcctttctggagtacttatggcatcagtttataatctatgcgcatagaaaaataaatttaatataattttcacaccctgcccttttcatgagatgttgatttcataaatttgcatcataaaaactagtggcccatggaaggagttacagagacaaagtttggagctgtgtcaaaaggatggaccatctagagcctgccatatccagggttccatcccataatcagcttccaaacgctgacaccattgcatatactagcaagattttgctgaacggacccagatatagctgtctcttgtgagactaccccggggcctagtaaacacagaagtggatgctcacagtcagctattggatggatcacagggccccccaatggaggagctagagaaagtacccaaggagctaaagggatctgcaaccctatagatagaacaatgttatgaactagccagtaccccggagctcttgactctagctgcatatgtatcaaaagatggcctagccggacatcactggaaagagaggcccactggacttgcaaactttatatgccccagtacaggggaacgccagggccaaaaagtgggagtgggtgggtaggggagtgggagggagggtgtgggggacttttgggatagcattggaaatgtaaatgaggaaaatacctaataaaaagtataaaaaaaaaaaaaacaaaactagtgtcaaggactgtcacctttacttatatggtagaatattagtttgtttttcctgagttggagagcagatagtcctcttttcctgtgttccatatttagtaaataagcccaagcactaacccagaatcccatgatggatcagttgatgagatttgtatgatgggactagcatgctcaacatgtgtagatgcttgctgtcggcatttcttgtctccccaaagcctgcgttggcttccacattcctcccatggcacatatgtgccccctttcaaacataaaccatataactgaggtgttagaacgggagaaagagaaggactttgatatcaaagtactgatagctctatttgctgtaataatgcaaagcaatttttatatatgttattggtgcgtttaaatgtatcatagaaataaaaaaaagtcctttattacaataggattcaccagattggtacatgtatagagagactaaatataattttccattaagacatgctgtctcaagtgttctcaggcttactcctcagagtttatgttttgaaatataaggttttcatgagtaaagttaaatatgataccaaacatttatgtaaagattcattagaatcgtgacatttataacttttatgggtggacagagtttttccaaaactagattctcatcaaaacttattcttttctcataggaatggaagaagggcttttggggagttagaacatcatgtataataagctttgtatggtgtattctgtacttaaagttctttacaatgcaataagaaattcaccattcattagaaaaagtggagaaagttttagattctaaaatctttctagatttcatgaaatctttggactgtaatgtagtttcctcatagcggttttgaggaatcccttgattatcctccatggagcaggcccgtaatggacatgacaaagacaacttacaagatcgtagtaaatagattaggatctattctgtaagtaaaacgagaaagtattctgtaagtaaatcttattctcatatgttcagtttaaatacatatcagaagctaaaaggaggtgttttgtttcgttttgttttgatttcctcacctaaatgtgctaattactagttctctgaagctgttttaggcaagccgtggctgagtttttaagaagcagagagtaaagaaatcatgtcctcagcagtatggcttttaaaattttgccaaagaagggccatccaaagatcgccccacctggggacccatatcatatacagttaccaaacccagacactattgtggatgccaagaagtgcttgctgacagaagcctgatatggctgtctcctgagaggctctaccagagcctgacaaatacagaggcagatgcttgcagctaactgttggactgagcatgcgtgcccaatggaggagtgaaaggactgaaggagctgaaggggtttgcagccccataggaggaacaacaatattaaccaaccagacctccccagagctcccagggactaaaccagcaaccaaaaagtacacatggagagacccatggctccagctgcatacatagcagaggatggcctagttggttatcaatgggaagaaaggcccttggtcctctagccccagtataggggaatgccaggccggggaagcaggagtgggtgggtgagtggaggaacaccctcagagaagcagggagagcggggatgagatagttggttgtcagaggggaaaccaggaaaggggataacatttgaaatgtaaataaagaaaatatctaataaaaaattcaagataaaataaaatatcatcacttaaaaaaaaaaaggaatttctccaggatattggtgcatttgtaccatttgctcccagaagagattgcactgttacagtttgtaaagactcactttaagtgccataagtaactgctttggcataaggtacctgttcttgaatcattttctctcctctctctctgtccctttctctctgcttctttctccgtctctgtatctctctatatctctcactgtcttgcaatcctatgtaaatcttataatttcattgcattccagaaccgttcttttgacaggttcagtgaggggctaagtgtattgatggttctttacctgctgtaggacgctcttgagtttgctttacagctggctagggtctttggatccttccttctttctttccttccttccttccttccttctgcctgnnnnnnnnnnnnnnnnnnnntctttggtagagctatatcataacaatagctgtacccttcctttctgcctgactacatctcttatgattcccacagacaattcttttgtaaggtccctccccctaaatccttgctgtattctagcccctaactccagaatacactcactgataactcactgaccattcctgtatgtgaatcatggaagatgtctatagatcttcccctctcctttacttcctgtagaatacctaccagtccaattcccagctctatagcaatccttctattctagggtgacctcttttctttctttctttctttctttctttctttctttctttctttctttctttctttcttccctccctccctccctccctccctccttccttccttccttccttcctctctctctctctctctctctctctctctctctctctctctctctctctctctctctctctctctttctttctttctttctttctttctttcttttctatttgatttccagcctctcttggtaaatccagtaatgcttcttatgggaatcaagtgaaaactatctttaaaatatgaaaggatagacttttaaaaactggacctgtactttttctatcagcttttaaatacctgatttgtttgattgttttggagacagggtctcactgtattgaccagggtagcctcaaatttactgagatctaccaggggctaggattaaaagtgtacattgccacgcttggtctaattatctgctttttactgataggaataagttctatgagcagatgtggatttagctcatatcctattaaaatggctttttcataaatcctttatacatatttggttttaaatatttgaatttcttaaaccttaaaaaaccttacttgttctagtatctcattgcatattcacatgcatatgctgggtagttcagaatgccatattccaaatcatgttctatcaagttatttgttaaatgtgttctaaagcccttgaattatatttattcttttttcttattttttattggttattttatttatttacatttcaaatgtgatcctcactcccagtttgccctccacaagcccactatcttctcttcccttccctgcctctatgagagtgttctaccccttcccacccccattcctgcctcagtgtcttagagttcccctatcctgttggtcatcaagcctccactggaccaagggagtcagtgctgtcacataaggtagtcctctgcaacaaatccagctggagccatgggtaccccctctgtattctttggttggtgctttagtccctgggagctttggggatttggttggttgatattgttcttcctatgaggttgcaaacctcttcagctcctacagtccttgacctaacttccccactggggtccctgcactcagttcaacgtttagctgtgtatatccgcatctatattggtcaggaattggcaaagcctctcaggagacagccatataagtctcctgtcagcaagcacttcttggcatctgcaatagtgtctgggtttggtgtctgcatgtgggatggattcccaggtggagcagtctctggatggcctttccttcagtctctgctccactctttgtccctgtatttcctttagacaggagcaattctgtgttaaaatttttggagatggtgggtggccctattcctcaaccggggggccatgtctaaactctggatatggtcttgacaggttctccctcccctttgttgggtgtttcagttaatgtcatccccaaggggtcctggaaggctcatgctttcctggcatctgggattttctggtagctacccccagttcccaatcccacattgctacacacctctgttgaagtttctggctctctgtacatctcctccaactcctcccataactgattcttcccctctttttctgctccccctcttctcttcctcccaagtccctcccaccctctacttcccttgattattttgttccctattctgagtaggaactttattatccacactttgttcttccttcctcttgagcttcatgtggtccatgagttgtatagtgggtattttacactcttgcctaatatccacatatcagtgaatacataccatgtgtgttcttgttttagcataaaatgggctatagatatctgttaaatccatttggtctataatttctgttagtttcactgtgtctctgtttagtttctgtttccatgatctgtccattgatgagagtggggtgttgcagtctcccactattactgtgtggggtgcaaatggtgctttgagctttagtaaagtttcttttatgatagcatagatgttcagaattgagagttcattttggtagatttttcctttgatgagtatgaagtgtccttctttatcctttttgataatttttggttgaaagtcaattttatctgatattagaatggctattccagtttgtttcttgggaccatttgcttggaaaattgttttccagccttttactctgaggtagtgtctgtctttgacactgaggtgcattttctctatacatcgaaatgctgtgacctgtttatatatccagtttgttagtttatgtctttttattaggaaattgagtccattgatgttaagagatattaagaaaaagtgattgttgcttcctattatttttgttgttagaggtggaattatgtttgtgtggctatcttcttttgggtttgttgaaagaagtttactttcttgctttttctagggtgtagtttccctcattgtgttggagttttccatctgttattctttataggtcttgatttgtggaaagatattgtgtaaatttggttttgtcatgaaatatcttggtttctctatctatgttaattgagagttttgctgggtatagtagcctgggctggcctctgtttaatcttagagtctgtatgaaatctgcccaagatcttctggcttttggattctctggtgagaagtctggtgtaattctgataggtctgcctttgtatgttacttgacctttttcccttactgcttttaatattctttctttgttttgtgcatttggtattttgattattatgtgacgggagggatttcttttctggtctagtctatttggagttctgtagacttcttgtatgttcatgtgcatctctttctttaggttagggaagttttcttctataattttgttgaagatatttactggccctttaagttgggaatcttcactcttttctgtacctattatgtttaagtttggtcttctcattgtgtcctggatttcctggatattttgggttaggagcttttgcattttgcagtttctttgattgatgtttcaattttctatggtatcttctacacttgagattctctcttctatctcttgtattctgttggtgatgcctgcatctatgacccctgatctctttcctaggttttctgtctctagaattgtctccctttgtgatttctttattgtttctatttccatttttagatcctggatggttttgttcaattccttcacctgcttggttgtgttttcctgtaattctttaagggatttctgtgttttctctttaagggcttctacctgttttccttttcccatatttctttatgtccttcttaaaattctctatcatcatcatgagatgtgattttaaatctgagtcttgcttttacggtgtgatggggtatccatgacttgctgtagtgggagaactgggttctaatgattccaagtagccattgtttctgttgcttatgttctcacacttgcctctcactatctagttatctctagtgctacctgcccttgctgactctgactggatcctgcccctcctgtgatccttgctgtgttacaactcttcaggatccacctgtctctgtgattctgggatcctgtgatcttgggtatgtttgagctcctgggagtcaagctgcctctgagatcctgaaatcttggtgtgatcacgcttctgagatcgtgttgtgtcagaactgccgggagtcaagcttactctgggtgttgcaggggtaggtggggaaccagagccctgggtttcctctgggcacaggtacaagttggaaggaacctgtccctctggctgggcagtggtttgtgtttccttggttcctatgggggtcccagttatgctaggtgtgggaaggatgtggtggtgtcaactgtgatcttgaatgtatcaggaaagctgcagtgctcttgggtatcgagcttttctctgtggtcttgtgatcctgggtgtttcagagtccctgggagttggtcttactctgggtgttgtaagagtgggtgcagagccagcaccccaggtctgctctgggtccaagttcagaccagaaggaatctctgccactggttgagcgagggttcctgcgtccctggatcctgggggacccagttagtccaggtgttggagaaggtgttggcctctcctgtggtcctgcatgtttcagagcacctgggaatcaggctccctttgggtgtgcagattcaaactgggaggaacccgtgccactgaccaggtgggggttcctgtgtccctggatcgccggggtcgcaataactccgggtgttggggcaaatgttgtggccccctcacttgtgatcctgggcatgttagagcatctgggagttgagcttactctgggtgttgtgggactggaaaagaattcatcttgtttggaatattgttaggatttacaatgttccaaaaatgaactgtgcctaataatgtggtccatcttatgtttttgtaagtatttttagatagaatcaaagatagttgtattctaacactacttgtgtgtttttgtaattgttttccttttgtgaactcaggatttctacatgttctaaggtaaccactgagtttctgttaccttttgctaccaggataggtagttctgaattcctggtgtgattgtacatcacatattgtggctacaagaccaggaacctgtggcagcttactatctggactttagctgcgtgtccagtactcagtaatgcagcagattttgaatccctggacaggtctgtagtcagaaatatgtaggacaagtggcacttctgtagtgtttgacataaatccccaatacaagcataaatttttgaatatactttgaaaatatgtctaaacatactacaagcatcagtttaatattctacatgttcatgtccttccctaattccatttccttcctgtgctcaaaaaagggagacaggtaccaaactgtgagaaacagtccttatgaacagtgctgtgacaaattggtgggccagctcagtgtaccagcctatactccagcacttagtcaggagaatggacaggaacctttgtacaaaacagatgattgaaacagaagtgagagaagaagtggaaatggaaatgaaactgtgaataactcaaaacttgcctttgccgtcaatcatttggtctacaatggttgagggactggtgatactgagtgttatttgcaggcctattttgttattctgaattaatttttcattttaaaaattaaacagcaacagaaaaagataaatatattcataacctgtaactaatagcacatgttgatctttgacctctatgctctatcttattatatgtgttatagtaagaacattaagtgagattgatttgaaatctcccagtttcccttctgagcagtctgtttctctgcagagacatggcctactctgacatattttgtccttccttaccacattttttaattcctaccagctaacctccttcctttcccctccccattttgttgcctgagttacctagactagctgttaactcaagattttcttttcttggtccctcaagtagctaggactatagatgaggtgtaccacacccaacatgaaactctgcaaagagggccgggtgtggtggtgcatgcctttaatcccagcactgggaaggcagaggcaggtggatttctgaggccagcctggtctacaaagtgagttccaggacatccagggctacacagagaaaccctgtctcaaaaacaaacaaacaaaaactctgcaaagatttttgtggggaatattttgtgtgccacaccctattctattccaaccacttgatcttattagttgagtctccaggaccacccacaactacccagttctttgaacttttacattggtacaaggtgtccataaatattattgcatcggttcaccttcgtctatctcctctcattctctcagatgttcactggagcaagtggcatgaactgtttcatagatgaggcaattgagaagatgaaatctatgtaattggccgaccttataaagagaggcactactgaaatccagatcacctctacccttctaaatccttaccccaaatatccagcaatccatgaacactcttataggcgttacctttcctgttcccggtacacaatatctaacagaagcaagggcaccaacattcagtttaagtggttatagattcttgttcacaaaatgtgcaggaagtttctaagtgttgttttttgtttgttctcttctgtcttctaggcagaaaatctggtgtattaactgtgaaaattctagaactgcatgaggaatgcagcatgcaagttgcagtatgtgagcagttagcagggcctccaatcaccagccctcccggaggactagctcctagaccaggagcctacctgaaggtactcttcaccagagagactgcagaccacttgatggggcatccccaggacatcatttacatcttccctccttggtgagtgtaaagaactgagtctaccagttgttaatcattaaggttaccttccataggagatctttctagagcatcatagccagtggtcatttatagtctgcagtgacctctcatggttcttaggatcacttgtgaaatggcatcaggctacctgtggatacagctcctagattgtttccttcttatatgtgtgtgtgtgtatgtgtgtgtgtgtgtgtctgtctgtctgtctgtctgtctgtctgtgcagattggagagtgtgtgtgcatatgagtacagttttcctcacaagtcaggagagagaatcagattcctgagaactgccccacaactctttttttttttcccccgagacagggtttctctgtatagccctggctgtcctggaacttactttgtagaccaggctggcctcgaactcagaaatccgcctgcctctgcctcccaaatgttgggattaaagacgtgcgccaccacgcccggcgccccacaactcttataggcagttgtgagccaccctacctaggtgctgggaatttaacttgggtcctctacaagagcaataagaattcttacctcctgccgggcagtggtggagcacgcctttaatcccagcacgtgggagggattaaaggcgttttgcaaaggaaaaatttctttataatgttataaggacaaatgcttatagattattgttaggaactatgttattttaataaaatagtggatgtagattctccttcaataatcatgacttcaccagcagtgtgaaggttttcagtaccaggcgtggtctctttcttgttaagcaagtcttaaaatctaattagagaacaatgggatgacagaaggaatgcagaagaggatacaagtgatctaatagggaagtgggaaggaggcctccttgaagagagggaggaagctaaaataacacaaatggctaaaaacctacaaggaatcaaccattagctgtagcatatattaataaacaacaaatacacactgtctctggctaggcaccggctggcagtctcggtctgttcttagcctggcacataggccgagactgcattttttccctttaaccaaagcctgtcccatcaaaattggctctgcttatccaaagcccggaaatgactctccaccttgtggctggttgctgccaaatccactccgcactctcaaattcctgtggctagctggcctgtacttcttgcaaatccatgccctgccatacttacctttcccttggagcctgaacacggatctgccatggatctcagttgaatcaccctgagaaagcaaacaccagacaatcttagacatcaacagataacaaaatcgttgggcgcagaacctagcatcctaatcttcccaaatcttctggtggcggatccaggacccaccactcatactaacagcctccggcctcctacatgttggttgccttgctcctgttgtccaaaaagcaagtttctttctcctgttttcccctcttcctctcctgacctgaaagttctgcctcctcgcccagtgattgggtctcacagatgtcctttgctggtttcctctttagtatccaatcaatagtgggggggggggggattccactataattagctttttacttaaaatagtataatgcacataattgaggtagaagcatactactgcttatcactgccatgctggctgttggtatgtttcataagacaccagtggctaggactgtaggttgcatctgtcctttggaagcttgcacaatgccttttggtaccatgaaagctagtcttcagggaggaggcactcagattagttctacccaataatagttctctccattatgtttatttatctttttagcccaacataatacttcctgtattttccttgatttcttttttttttaatatataaaaaatcttagactttttatgtagtgaaaatttttcttcctctttcagttatggcagagaggtttcgtgggtagtattagtatgtagttagtgttggtgttagtatagtgggtagtaactagtagttgatgttagtgtatgttcctggaatagtctttcaggacttggaatgcaatctcgaggctcctctggcttctgatactttctttgagaaatcagctgttactagtgggatttccttcataggtgacttatgttctcattctcttgtactttcttttttttttttaatagttaatgttttgaatataacatgctgtggggattttcttttccagccttgtctatttagtgtttttttgtgattctgtgttcatatggatgtgtcttttttagattggagtaattttcttctataacgttgctgaaggtctggtctgccactgacttgggatttttcctcatcaattcctataattagaagatttggacttcccatggtctcacagatgtcctttgttggtttctttttgtttcttttctgctttttgttttgttttgtttgttttgagggatagagtttttctgtgtagccctggttgtccttaaactcactttgaagaccagtctagcctcaaactcacagagatcatctgcctctgcctcccaagtgctgggatcaaaggcgtatgccaccatgcccagcttgtattgcttttctgtattttaattttttttttatgttccttgatattttggtctgaatcctctattttatctttgagacattgtgcttgattcatttctaattgtaaagctttcctttgcattttctagttagactactgggtttttcaattccatcttaatttagtcctaagtgttctccagcatttctatctctattgaattttattttcaaatctttgattctttgtcatttccatcaaccttatgtttgtattgtttttgttatcacagaaggagaaaagttaagctctttcttgaattttttttatggtgtgcgtgtgtgtgtgtgtgtgtgtgtgtgtgtccttacttttaaaactccttgaattctttgaggaaatttatgatgattcctttaatgcttgtgccctggagttgatctggatcattctccttagcatttggacaagctggtaggttttaaagaacatagtaacatagtggcttgatctttaatattcttggtattcctgccatgagatccaggcgtgagaacttcattagtttttagtatattatagatgaagaagggtcaaagaagagagaagctgtagggttcagttcagcctagagcagcagttctcaaacttgcaggttgaggggtcacctaagatcatcagaaaacacagtttacattacataacaaaagcaaaattacagtttttttaaagaagtagatagagtttattcaaatttaaacaatataacatcaaataatgagagcaaggacatttatttttattcctttttgacgatatggcagaaaaccaattgatatttgaaatgtagaattgactgtagcttttctttcctaagtttctcttttccaacttatggaaatataagtaagcattaaaatatttctgctaaactttgttacttttagcaataatctagtcaccaaaatgctattttcagaataggttctttttttgcatattttatttttgtgctatcattaaaacttcgtagttttatatctatgctaagacatatgtcctttgactctaattaatagtttcattttctataatcaactgtgttactcttctggattttatggcctaatatgacataagatcaaaaaatcctttaattgtattctaattagttaacctattatcacagccccactaataccataggagatcattatcatttgtttcttttctcttctattagttttgccaatcgcaacgctcttttgtcatatctcatttttcaaagttgaagacaactttattaaatcaagggcatggtttggcccagtcctgtccatcttctgcctatcagtcaaatgttctggataaattctaggaaaaaaaatgtacttctttgaataaaataatcaaaagaaaataaaaatgtagagattagttgactaaaggatatcttctgaaatctcctgttaattagcctgatgaatatgtgaagaatgatatatactatggataagacaagaatgtgaaatataatcagaatttgacattgatgagaccatgatgggtcattatacattctttttttaaaatttatttaattttttattttctttttttattaggtatttatttcatttacatttccaatgctatcccaaaagtcccctacccactcgcccatccactcccccacccacccactccaacttcttggccctggcgttcccctgtactgaggtagatgaagtttgcacaaccaatggtcctctttttccactgatggccgactaggccatcttctgatacatatgcagctagagacacagctctggggggtactgggtagttcatattattgttccacctatagggttgcagatccctttagctccttggttactttctctagctcctccattggaggccctgtgatccatccaatagctgactgtgagcatccacttctgtgtttgctaggccccagcatagcctcacaagagacagctatatctgggtcctttcagcaaaatcttgctagtgtatgcaatggtgtcagcatttggaggctgattatgggatggatacccggatatggcagtctctagatggtccatcctttcgtctcagctccaaactgtgtctctgtaactccttccatgggtgttttgtttccaattctaagaaggggcaaagtgtccacactttggtcttcattcttcttgagtttcatgtgtttagcaaattgtatcttatatattgggtatcctaagtttctgggttaatatctacttatcaatgagtacatattatgtgagttctattgtgattgggttacctcactcaggatgatgccctccagatccatccatttgcctaggaatttcataaattcattctttttaatagctgagtagtactccattatgtaaatgtaccacattttctgtatccattcctctgttgaggggcatctgggttctttccagcttctggctattataaataaggctgctatgaacatagtggagcatgtgtccttcttaccggttggagcatcttctggatatatgcccaggagaggtattgcagtgtcctctggtagtactatgtccaattttctgaggaaccgccagactgatttccagagtggttgtacaagcttgcaatcccaccaacaatggaggagtgttcctctttctccacatcctcgccagaatctgctgtcacctgaatttttgatcttagccattctgactggtgtacgatgaaatctcagggttgttttgatttgcatttccctgatgatgaaggatgctgaacattttttcaggtgcttcccagccattcagtattcctcaggtgagaattctttgtttagctctgagctctattttttaatagggtgattagattttctggagtcaaccttcttgaattctttatatatattggatattagtcccctatctgatttaggataggtaaaggtcctttcccaatctgttggtggcctttttgtcttattgacgatgtgttttgccttgcagaagcttttcaattttatgaggtcccatttgtcattctcgatcttacaacacaagccattagtgttctattcaggaatttttcccctgtgcccatatcttcgaggcttttccctactttctcctctataagtttcagtgtctctggttttatgttgtggtccttaatccacttagattttacattattacaaggatataggaatggatcaattcacattcttctacataataaccgccagttgtgccaacaccatttgttgaaaatgctgtcttttttccactggatggtttttgctcccttgtcaaagatcaagtgaccataggtgtgtggattcatctctggatcttcaattcttttctattggtctacttgtctgtcactataccagaaccatgcagtttttatcacaattgctctgtagtacagctttaggtcaggcatggtgattccaccagaggttcttttatccttgagaagactttttgctatcctaggttttttgttattcgagatgaatttgcagattgctctttgtaattcgttgaagaattgagttggaattttgagggagattgctttgaatctgtagattgtttttggcaagatagccatttttactttattgatcctgccaatccatgagcatgggagatctttccatcttctgagagcttctttaatttcttttttcagagacttgaagttccaatcatacagatctttcacttccttagttagagtcaccccaaggtattttatattatttgtgactattgagaagggtgttgtttccctaatttctttctcagcctatttatcctttgtgtacagaaaggccattgacttatttgagttaattttatatccagctacttcattgaagctgtttatcaggcttaggagttctctagtggaatttttagggtcacttatatatactatcgcatcatctgcataaagtgatattttgacttcttcctttccaatttgcatccgcttgatctccttttgttgtcaaattgctctggctaggacttcaagtacaatgttgaataggtaggagaaagtgggcagccttgtctagtctctgattttggtgggattgcttccagcttctcaccatttactttgatgttggctactggttcgctgtagattgcttttatcatgtttagatatgggccttgaattcctgatctttccaagacttttatcatgaatgggttttggattttgtcaaatgctttctccacatctaacaagatgatcatgtggtttttgtctttgagtttgttgatataatggattacgttgatggatttctgtatattgaacgatcccggcatccttgggatgaaacctacttggtcaggatggatatttgttttgatgtgttcttggattctgttagtgagaactttattgaggatttttgcatcgatattcgtaagggaaattggtctgaagttctctacctttgttgggtctttttgtggtttagttatcagagtaattttggctttatagaatgagttgggtagagaaccttatgcttccattttgtggaatacattgtgaagaactgggattagatcttctttgaaggtctgatagaactctgcactaaatccatctggtcctggacttttttggttgggagactattaatgactgcttctatttccttaggggatataggactgtttaggccatttacctgatcttgatttaactttggtacctggtatctgtctagaaacttgtccatttcatccaggttctccagttttgttgagtatagccttttgtagaaggatctgatggtgttttggatttcttcacgatctgttgttatgtctcccttttcatttctgattttgttaattaggatgctttccctgtgccctctagtgagtctggctaagggtttatctatcttgttgatttttctcaaagaaagagctcctcctttggttgattctttgaatagttcttcttgttttcacttggttgatttcgcctttgagtttgaacatttcctgccatctactcctcttgggggaatttgcttccttttgttctagaacttttaatgtgttgtcaaggtgctagtgtgtgctctttctagtttctttttggaggcactcagagctatgagttttcctcttagaaatgccttcattgtgtcccatatgtttgggtatgttgtggcttcattttcattaaactccaaaaagtccttaatttcttcattccttccttgatcaaggtatcattgagaagagtgttgttcagtttccacgtgaatgttagctttctattatttattttgttattgaagatcagtcttaatccatggtgatgtgataggatgcatgggacaatttcaatgtttttgtatctgttgaggcttgttttgtgaccaattatattgtcaattttggagaaggtacaatgaggtgctgagaagaaggtatatcctcttgttttaggataaaatgttctgtagatatctgttaagtccatttttttcataacttctgttagtttcactgtgtccctgtttattttctgtttccacgatctgtccattggtgaaagtggtgtgttgaagtctcccactattattgtgtgaggtgcaatttgtgctgtgagctttacttaagttactttaatgaatgtggctgcccttgcatttggagcatagatattcagaattgatagttcctcttggaaaattttacctttgatgagtatgaagtgaccctccttgtcttttttgatgattttgggttggaagtcgattttattcgatattagaatggctactccagcttgtttcttcagactatttccatggaaaattgttttccagtctttcattctgaggtaatgtctgtctttttccctgagatgggtttcctgtaagcagcaaaatgttgggtcctgtttttgtagccagtctgttagtctatgtctttttattggggagttgagtccattgatagtaagagatattaaggacaagtaattgttgcttcctgttatttttgttgttaatgttggcattcttttctttttttttaagatttatttatttattatatgtaagtacactgtagctgtcttccgacactccagaagagagagtcagatcttattacatgtggttgtgagccaccatgtggttgctgggatttgaactccggaccttcagaagagcagtcgggtgctcttacctactgagccatctcaccagcccggcattcttttcttgtggctgtcgtcttttaggttagttgaaggattactttcttgttttttctaggacatggtttctgtccttgtattcgtttttttctgttattatcctttgaagtgctgcattcgtggaaagataatatgtgaatttggtttggtcgtggaatactttggtttctccatacacagtaattgagagtttggctgagtatagtagcctgtgctggcatttgtgttctcttactgtctgtataacatctatccaggatcttctggatttcatggtctctggtgacaaatcttgtgtaattctgataggcttgcctttatatgttacttgacctttttcccttgctgcttttaatattctatctttatttagtgcatttgttgttctgattattatgtgtcacgaggaatttcttttctggttcagtctatttggagttctgtaggcttcttgtatgttcatgggcatctctttctttaggtttggaaagtttcttctataattttgtttaagatatttgctggccctttaagttgaaaatcttcattaaattaattaaatcttcattaggatctttttgccttttgtattttctttgattgttgtgctgatgttctctatggaatcttctgcacctgagattctctcttccatctcttctattttgttactgatgcttgcatcgatggttccagatttctttcctagtgttttcatctccagcgttgcctcactttgggttttctttattgtgtctacttccctttttaggtctagtatggttttgttcatttctatcatctgtttggatgtgttttcctgtttttctataaggacttgcaactctttagcagtgttctcctatatttctttaagtgagttattaaagaccttcttgatgtcttctaccatcatcatgagataggcctgtaaatccgggtctaggttttcgggtgtattggggtaccctggactggctgaggtgggagtactgggttctgatgatggtgagtgctcttggtttttttttttttttttagtaagattcttatgtctgcctttcgccatctggtaaactttggagtcagttgttatagttgtctctggttagaacttattcctctcgtgattctgttattctctcccagcagaccagggagactagctctctcctgagtttcagtggtcagagcactctctgcagtcaggctctcctctttcaaggaaggtgcacagatgttgggagccgcgcccacattcgccgttacaagatggcgctgacagctgtgttctaagtggtaaacaaataatctgcgcatatgccgagggtggttctccactccatgtgctctgccttccccgtgacgtcaactcggccgatgggctgcagccaatcagggagtgacacgtcctaggcgaaatataactctcctaaaaaagggacggggtttcgttttctctctctcttgcttcttacactcttgctcctgaagatgtaagcaataaagttttgccgcagaagattctggtctgtggtgttcttcctggccgggcgtgagaacgcgtttaataacaattggtgccgaattccgggacgagaaaaaaactcgggactggcgcaaggaagatccctcattccagaaccagaactgcgggtcgcggtaataaaggttcccgtaaagcagactgttaagaaggattcaactgtatgaattcagaacttttcagctggggaacgagagtaccagtgagtacagctttacgagaatgaagacaacccattttggataccagaaagactcacccgaaaaatccagactgaccaagggaatactgatgtccctcgtcttggtgatgtccagggcgtcaataataaagagagagcagcgttgggggataatgtcgacatttccactcccaatgacggtgatgtataatgctcaagtattctcctgcttttttaccactaactgggaactgggtttggccttaattcagacagccttggctctgtctggacaggtccagacaactgacaccattaacactttgtcagcctcagtgactacagtcatagatgaacaggcctcagctaatgtcaagatacagagaggtctcatgctggttaatcaactcatagatcttgtccagatacaactagatgtattatgacaaataactcagcagggatgtgaacaatagtttccgggattgtgtgttatttccattcagtatgttaaatttactagggcagctaatttgtcaaaaagtctttttcagtatatgttacagaattggatggctgaatttgaacagatccttcgagaattgagacttcaggtcaactccacgcgcttggacctgtcgctgaccaaaggattacccaattggatctcctcagcattttccttctttaaaaaattgggtgggattaatattatttggagatacactttgctgtggattagtgttgcttctttgattggtctgtaagcttaaggcccaaactaggagagacaaggtggttattgcccaggcgcttgcaggactagaacatggagctccccctgatatatggttatctatgcttaggcaataggtcgctggccactcagctcttatatcccatgaggctagtctcattgcacgggatagagtgagtgtgcttcagcagcccgagagagttgcacggctaagcactgcaatggaaaggctctgcggcatatatgagcctattctagggagacatgtcatctttcatgaaggttcagtgtcctagttcccttcccccaggcaaaacgacacgggagcaggtcagggttgctctgggtaaaagcctgtgagcctaagagctaatcctgtacatggctcctttacctacacactggggatttgacctctatctccactctcattaatatgggtggcctatttgctcttattaaaaggaaagggggagatgttgggagccgcgcccacattcgccgttacaagatggcgctgacagctgtgttctaagtggtaaacaaataatctgcgcatatgccgagggtggttctccactccatgtgctctgccttccccgtgacgtcaactcggccgatgggctgcagccaatcagggagtgacacgtcctaggcgaaatataactctcctaaaaaagggacggggtttcgttttctctctctcttgcttcttacactcttgctcctgaagatgtaagcaataaagttttgccgcagaagattctggtctgtggtgttcttcctggccgggcgtgagaacgcgtttaataacacacagatatctagtgttcagacttatctcctggtagaagatgaaggcccgaaacaggacctgtcccagaagctgttagcttctgtagtcaacactgtcacctgtgcagactagtctcagtggagtctgggagccaagatgtatctcgcagatgctcagtcaaagccctctctggccaggtggacacctatcctctggcaaggaaggtgtccagatgtctggagcctgaaaagggggctgcctcacaatctctgtgcctcccgcctgttccagaagctcttagcttctgtagtccacactctcacctgtgcagagtagtctcggtggagtctgggaaccaagatgtctcctgcagatgctcaggcaaagccttcccagactgggtggacacctatcctctggcagtgaaggttcccggatgtctggagcccaaaaagggggctgcctcgggtcattatacattctaaggtaccacatgttctcaactgttctgtaattctaaagaaagcttcgttatctgttaataatattattgttcaggtgcattcttttattagatttttttttatcataattgaagtacaacttttctcccttctctttcccgcctccaaatttcccatagacctcccctcactcctttaaattaatagcatcttcttttatttattggcactggacaacaactaatgtcccattattttttagagagttgatcaaaaggaggtaatatcaaaatacaactgacaacaggttggctactattgcaactgtcattaataatagttggccacttatatatcatattagggaagagacagttttgcatttggaacaaaatacctccaggtatagctgctcaatcttttacagaagctagggaaatgggttattgtgttccatattgtggatatgattattaacagagatgggtttttgtctgtgataaaactatacctatgaaaaaattaacaaagtacaaatgtagttttcaacatgcacattggccttcagctgggtccctgcagctgctggaactggttgttatgtgttgtccctggcatgatagtagtgcttattagttgttttgttgttgttgctgctgctgttgttgttattactgatgccactgtaacagctatgtcttctctgacaacaatgcaggctacagtaattctccatggcaactccatgtcccagatggctactcagatgtcaggttgtccaactgggacagcctgacctgggaggagacagtacccaaacatgtagccagcccttcagtagtgggtttttgtcttggcagaatccagcagttgtctctcctgtattcaagttttcccattttggatagcattttgtgtgcagtatgaagcttgtcatccttaatatcatctccaaatataagttcttagatgatcactttctttgaagtggaatggtggtaccttagtgccaggagcagatctggtggcatttcagcaattcatctttattccttggcatgtgattccttggagattattatctatgtggatttatttatccattttttctcttttagtttattatccttctctgtattcaattttatttaaaccccttttgttggaatatcttttcttaatgttccatcattttctttagacatttctcttgtccagtggtctctggattccttagttggatgactttcttctcaggttcagagattcagtccattatcatcaaggcaggaaacaaggtagcatccaggcgggcgtggcacaggaagtggtgagagctctacatcatcatccaaaggaagccaaaagcagactgttctcaagcagctaggagaagggtctcccaaaattacagttttaaatagtaataaaaatgaatacttttgttgttatgtggtggtttcattgtgagggttgcagcattagaaaggttgagaaccactgggtctagaggttggaaatatcttgggtgggatagaatccgttagactgaggagatggggctgctatacagggtgtgtagatggcaaggaaggaccgatgacgctgctgcagaaaggatgttcaagaaaagatcagcattacggagcaggatagattctggaggagggtgtggggtatgtggggataaccattttcacaatattaatcctgctgatccatgagctttggggagtcctaattttctgatatcttcatttttttttcttcaatgttgtagagcagtggttctcaactttcctaatgctgcaaccctttaatatggttcctcatgttttggtgatcccctagccataaaattatttttgttgttacttcataactgcaattttgctaatgctatgaattgtaatgtaaataattttgtagatagagaggtttgccaagagggttgtaccttcagatttgaccaaacctcaccacaagttgagaaatgctatcttggagtttttattatacaagtatcttacttccttagttggaggtaccccaagatttttttgagagagttgtgaaagatgtttttccccctctgatttatttctcactgtgtgtatataagttatagattttttgtgtgttaactttgtatcctgctattttgctgaaagtatttatcagctgtagaagtttcctgaaaactctttaggatctttcctgtataaaattgtatcatctgcaagtacaaatactttgtctcctttcctttgctattgaatcctccttcattcccttcagttgtcttattcctctagtgaagactccaagttatatattgactagatatggaaagaatgaacaactttgtcttgttcctgattttagtggaaattctgtgtgttacacatttctcttttagaacatgttgatcatgggcttcttgtaaattgcctttttatgttgaagtatttcctttgtatcagtaatctctctaggacttttatcatgaagtagtgttggatttagtcaaagaccttttccacatctaatgagatgactatttggtttctgtccttttgtctgtttatatggtgggttgcatttattgattaatgttcattcaaccatttctgcatctctaggatgacgctgacttgagtgtggtggataatcattatttgatgtgttcttaaaattattgaaataaaataatttgctattatattattgggatttttttgtttaagagagatatttgtctatagatttttgtttcatctggttttgatatcaggataatgcttcataataagtgtttggaaacagtccttcattttgtagtttatgaatagtctggtgagtagtagtgcttctttgagtctggtagaattttatgctgagttcatttggccctaggctttttctggttgggagattttaaattactccttatatctcagtagggcttatcagtctatttaaataatttcttcatcttgatttaatttagtaagttttatatatctagaaatctatcactttcctctaggttttccaatttggtgaaatacatgttttaaagtgatgtccttataattatctggatttcccttgtctgttgtactttttcatctctagttttattagttgggatcctcctaattttattaattgagtaaaatttcatcacatatgtagtttttttttccaaagaatcaactctttgttttaaatgttattgtttctatttcattaatgtcagccctgagtttgattctcttgtgttgctgtattttattaatccactctaatctccctggctgcagcgtgttccttgctagcgggcccaatgctctggattctggaatgacagacagacaggcagacacacacacacacacacacacacacacacacacacacacacacactcactcactcactcacacagccttatacttaatatgccttaattcagctcaatggctggaccactcccaaatctccacattgtttacgtctcccctctgattttcctgaattattacttatcaggatattatataatatctatattctatctttgctaccctgtactcaatgggggcgggggacccattgggactgcacttccctggctcttacatgattgtctgctctctcttctgcagctctcaaacctgtttccccagcatggtggtactaaatctttttcttccttggttaccttgcccaggaaatctaaagtcccacctctgtctccctccctccagctgctttatttaccagttagagctaactagggacagggacctgcataatcttaagttcaggattatcttgtaatttttgggaacccagttaacataatacaagtgttaaatcaaatccacaataattttgccccttttaattttggaggagggtgctgtttcttcttgtttttctaaagctctcaagtgtctcattacattattaatagatcccttcaggttttttgatgtagacatttagtgttattagtgttcctctcatcatttatagaggtttgagtatattgtgatttcattttcatttaattctaagaaattatttctctcttgatttctgctttcatctaatttctatgcaatagtatgctgtttagcctccgtgagttgctatcttctgttttctattcttgctgtccagttataatttatgatggtcagagcgaatgcagagtgttacttcaattttcttatctgtgttgagatgacctttgaggtcaatcttgggaaaatttggtgaactcctaaaaagtaaatgtatactatagtcttgattgaagtgctttgtagttatctgttaggtttctttgtttgtgatattgttctggttagtttttgttgtcatcttgacataggcctgggttatctgagaaaaagaaccctcaagttaggaaatgtctcaatcacattgtcttgcaggaaaggctgtagggcactttctcagttaatgattgatttagaaatgcccagccactgtgggttcaagcctattattagtaccccttatgaacatccttttctcctcaagttgcttttggtcatggtctttatcatagcaatataatgcaaactaaaatagatgctatttaaattcagagttcttagatttgctttgtgtctggatgacttgtctgataagaatcaggcactaaagacacccacttttactgtgtttcagtttagtatgtgattttagatctaagtgtttcttttgtgaaattatgtacttgtgcatggtatgtgtgctggccagttttatgtcagctttatacaaactatagtcattttggaagagagaccctcaaatggcaaaattctccagctcgattgacctattgagaagtctgaaggacattttttcgattgatgaatgatatgggcgttttgagctcattgtgggcagttccaccccttgacagatggtccttgatggtttaagaaagcagcctgagcaaactatggtgagaaggccagtaaacagtgttcctccatggcctgtgcatcacctcctgcatcattgttcctaccttgagttcctggccagactttcctgaatgatgaacttgaagctgtaagatgaattaaagtctttccttcataatttgtgtttggttatgacattttaatcacagcaatggaaactctaactaagatagtatgtaaatattaaaattgtaatatccttttggtagatttttcttttatgagtatatgtacctccctatctcttctgatgagttttgggttgaggtccatcttgtcaactattaagatagctagaccttaaatttccatccttctaacctaaggtggtatctgtctgttaatatgatatatttcttagaggtagcaaaaacaaacaaagctataagatacacaatgtttataaaagtactgtcaagtccattttatattggccacttactgctgaggttgtacagattttaggacacatacataactgaaaagagatcaagaaggatacaaataggaaataaagaaatcaaagtgttcttatgcacaaattttatgattttatgcataaaacacactaaaaattccatcagggaacttttacatctgataaacactttcagtaaagtagcaggatgcaaaaattaactcagaaaaattaggagtctttgtatatacaaatgacaaactagctgtgaaataaatcagaaaaaagcaccttttaacaatgacctcaaaaatgtgcatgtatgagagcgtgtgtgtgtgtgtgtgtgtgtgtgtgtgtgtttgtgtgtgtgtggagagagagagagagagagagagagagagagagagagagagagagagagagaccgaccttaggtaactataaccgagcaagtgaaagacttgaataataaaaactctttgcattaaagaaagaaatgggtaaagacctcagaaaattgaaaaatctcccgtgctaatgaatttgtaaattaatattatgaacatggccatcctgctaaacataatttattttcaaaagtccatatcaaaatgccagcataattcttaacagaaattgaagcaatgtttcttttttttttttaattttatttgatagacaagctattttttgcttcatgtgaaaacataaaaactcaggataggtaaaaacactactgcataattaaagtaattgctgaacataacactatctaaggtttcaagtcaaaaaataaaagcagcttagttctgacataaaaacagacccattgatcaatggaatcaaattgaacacacaaacataatttcacatgcttatggacacctgagttttgacaaagaagccaagaatacacattagagagaagagaatcttcaacaaatggaacaaatggtgctggtagaattgaatagttgcatgtgcaggaattcagatagattcattctctctctctctctctctctctctctctctctctctctctctctctctctctctctttctcatgtgtgtgtatgtgtgtatcaccatatcaccctgacaaaaactcaacatcaagtagatgaaagccctcaacgtcagacccctaatttgatagaaaagaagtagttcaataatgtcagactcattggcacaggaaaagtctttctgagaaggaaaacaatagcacatcactaaaactggtagttaataaatgggacctaaagaagctgcaaatcttttttttttaatttaattttattttttacactccatattccattccccgccccctatccaccctccatctgctcctcatcccacacctcctccccaccccaccccacctccacatcgaagcccaaacaccccaccccacctgacctctaaactccttggggcctccagtctcttgagggttaggtgtatcatctctgaatgaatacagacccagaagtcccctactgtatgtgtgttgggggcctcatatcagctggtgtatgctgtctgtttggtggtccagtgtttgagacatatcaggggtccagattaattgagactgctgatacttctacaagattccccttctcctcagctttcttaagccttctctaattcaacaacaggggtcagctgaagcagctgcaaatcttatgtgtgtcaaaggacatcatcatttgcacaaagtgacaggctatagaatataaaaagatcttcattttttacacatctgatacggttaatatccaaaatatataaagaataaaaataactgaacatcaagaaagtaaataagtgcttccattgtgcttctgcacccaggagatggggctgttctacagccctctgagcacaggtacagccagaggaaagctggtctccaagtagtgttctgacacccaggctcagaggtgagatctccaaattttttttccagtgattgtctaaggtgggaccagccagaagtacacaggacacaggagcagtggatcagctaggacagggtccttccagttgccatctgcatccaggagcttggactgttccacagacctctgtcttaagggtcctaccaggggagagctggtctcccaggagggctgactcccaggcgggcttacaggtccacaagtgggacaagctcaaggcagagaaagaaaaaccaaataacaccagagataaccagatggcaaaaggcaagcacaagaaacttaacaacagaaaccaagactacgtggcatcatcagaacccaattcccataacacagcaagttgtggataccccaacacactggaaaagcaagatttagatttaaaatcacatctcatgaggactttaagaaggacagaaataacacccttaaagaaatagtggagaacacaggaaaacaggtagaagcctttgaagaggaaacacaataattccttaaagaattacaggaaaacacaatcaagcaggtgaaggaaattgaacaaagccatccaggatctaaaaatggaagtagaaacaataaagatatcacaaagggagacaagcctggagttagaaaatccaggaaaaaaatcaggaatcatagatgcaagaatcactagcagaatacaagagatagaagagagaatcttgggggcagaagataccgtaagacattggcacaacagtcagagaaaatgcaaaatgcaaaaagctcctaacccaaaacatccaggaaatccaggacacaatgagaagaccaaatgtaaagataataggtatagacaagaaggaagatttccaacttaaagggccagaaaatatcttcaacttccctaacctaaagaaagagatgcccatgaacataccagaagactgcagagctccaaatagactggatcagaacagaaattccttccgacacataataatcaaaaaaccaaatgcaaaaaacaaagaaagaatattaaaagcagtaagggaaaaaggtcaagtaacatataaagttatacttctcagaattacaccagacttctcgccagagcctatgaaagccaggagatcctgggcagatgtcatacagacccaaagagaacacaaatgccagcccagggtactatatacagcaaagctctcaattactatagatagagaaaccaaggtattccatgacaaaaccaaatttacacaatatctttccacacatccagcccttcaaaggataataaatggaaaactccaaaataaaaaggaaggaaattacaccctagcaaaagcaagaaaataatattcttttaacaaaccagaaagaagatagctacataaacacaattccacatgcaacaacaaaaataatagaaaataacaatcacttttccttaatatctcttaatatcagtggactcaattccccaataaaaagacatagactaacagactggatacgtaaacaggaccccacatttagctgcatacaggaaacctacttcagggacaaagacagacactacctcagaataaaagtctggaaaacaattttccaaacaagtgttcccaagaaaaaagctggagtagccattctgatattgaattgaatcgattttcaacctaaagttatcaagagataatgaggaatacttcatactcatcaaaggtaaaatctaccaaaagaactctcaattctgaacatctatgggacacatgcaagggcgccaacattcattaaagaatctttgctaaaattcaaagcacacattgcaactcacacaataatagtgggagacttcaacaaatactctcatcaatagacagatcatggaaacagaaactaaacagagacacagtgaaactaacaaaagttacgaagcaaatgtatttaaaagatatttatagaacattttatcctaaaacaaaagaatataccttcttcttagcacttcatggtaccttctccaaattgaccacataattggtcacaaaacagacctcaacagatacaagaagattaaaataatcctgtgcatcctatcagattatcatgaataaggctggtcttcaataacaacaaaaacgatagaaatcccacatacatgtagaagctgaagaacattctactcaatgataactttgtcaaggaagaaataagaaagacattatagacttttgagtttaatgaaaatgaagccacaatatacccaaacttgtgggacacaatgaaagcagtactaagaggaaaactcatagctctgagtgcctccaaaaagaaactggagagagcatacattagcagcttgacagcacaacttaaagctctagaataaaaagaaggaaatacagccaagtggagtagaaggcaggaaataatcaaaactcagggctgaaatcaaccaagtagaaacaaaaagaactatacaaagaatcaaccaaaggaggggctagttctttgagaaaatcaagaagatagataaacccttagctaaactaaccagaggtcacagagacagtatccaagtcaacaaaatttgaaattttcagggagacataacaacagaaactgaggatatcaaaagaaatcatcagatcctattgcaaaagcctatatacatcaaaactggaaaatctgaatgaaatgggcaattttctagtcagatcccatgtaccaaaattaaatcaggatcaggtaaatgatctaaacaatcctataacccctaaagaaatagaatcagtcattaatagtctcccaaccaaaagaagcccacaaccagatgggtttattgcagagttctattggaccttcaaagtagacctaataccaatactcttcaaactattccactaaatagaaacagaaggaacactaccaaattcagtttatgaagccacaattactctgatacctaaaccatacaacgacacaacagagaaatagaacttcataccaatttcccttatgaatattgatgcaaaaatactccataaaattcttgtaaacctaatccaagaacacatcaaaacgattatccatcatgatcaaataggcttcataccaggaatgcagggatggttcaatataaggaatccatcaatgaaatctactgtataaacaaacacaaagaaaaaaaaaacacatgatcatttcattagatgttgacaaagcatttgacaaaatccaacaccccttcatgaaaaatgtcttagaaaagccaggaattcaaggcccatacctaaacatagtaaaagcaatatacagcaaaccagtagccagaatcaaactaaatggagagaaacttgaagtaatgccacaaaaatcagggactagacaaggttgtccactctcttcctacctattcattatagtactcgaagtcctagccagaacaattagacaaccgaaggaggtcaaagagttacaaattggaaaggaaaaagtcaaaatatcactatttacagatgatatgatagtatacttaagtgacccaaaaaattccaccagagaactcctacactggatagacaagttcagcaaagtttctggatgtaaaattaactgaaacaaatcagtgccctttctttacacaaagaataaacaggctgagaaagaaattaaggaaacaacacctttcataatagttacaaataatataaaatatcttggtgtaaatctaactaagtaagtgaaagatctgtatgagagaaacttcaagtctctgaagaaagaaatcgaagatctcagaagctggaaagaacccagatgtccctcaacagaggaatggttacagaaaatgtggtacatttactcagctattaaaatagtgaattcatgaaattcttaggcagatggatagaactagaaaatatcatcttaagtaagttaactcaatcacaaaagaacagacatggtatgcactgattaataagtggagagtagctcagaagttcaaaatacccgagataaaattcacagactacatatagctcaagaagaaggaagagcaaagtgtggatacttcgttccttcttagaaggaggatcaaaatacccatggaaggaattacagagacaaagtgtggagcagaaactgaaggaaagcccatccagagactgccccacctggggatccattccatatatcgttaccaagcccagacactgttctggatgccaacaagagcttgctgacaggagcctgatatagctgtctccggagaggctctgacagtgcctgacaaatacagaagtttatgttcacaaccatccattggactgagcacagggtccccaatggaggagctagagaatgaacctaaggaggtgaaggggtttgcagcctcataggagtaacaagaatatgaaccaaccagtactcccagagcttccagtgactaaaccaccaatcaaagaatacccatggctccagttgcatgttcctcagaagatggccttgggagatgtcaatgggaagagagtcccttggttctttgaagtctggatacctcagtataggggaatgccagcactggaaactgggagtgggtgggtcagtgaatagggagaggtgggatgggataggggtttttcggatggggaaggaggaaagtggatagcatttgaaatgtaaataaggaaaatttttaaaaagaagaaaagagaaaggaaataagtgaaattaaaattggagtgcataaaaaaacagagagttctcaaaagatgagacacaaatggctatgaaacacttaaatgttcaaaatctctagcaataagggaaattcaaagtaaaatcctgttgagatttcaatttaaaccggtcacaatggccaagatcaataaaacatgacagctcatgctggcaagattttgaagaattttaaaacttgtttcaaatgaaaattcaaacttgtacagtcagtttgcaaatcaatgtaattgtacctcaggatcctgaaatagatctgcttcaaaatcttcttgggcatgtacccaatggacactactccctactccctactgccgagagtcttgctcatccatgttcattgttgtgctgttcataatacccagtgttttgaaatagcctaaatgtccatcagctgataaatggataataaaaatgtggtgcatttacacagtgactattaatgcattgtttcaaaaaagaaaaaactaggaaatcttaggtaattggatagaattagaaataaatcattgtgagggaaccctgcctctgaaagataaagattgtatattttctctaatatcaggattttattatagatatccagtaaagaagcaacgtaaatcagtgacaacatggaattagcatccaaagaaaaagattaagaaacaagctatttaatcacatgtgtcataatcccggaattacataaggctctatgtttggcaccaacatgtttgtcttttagtgtgtgaattatgtattcccacataactgtaccctgcaaatctagggggaaagtactaagtccttagatataatagcatggcctgtttttttggaaatatagtttgtacttgcagcctttcaaatcttagaaatgaggaaattccaagcattccacatgaatagataattttagtcgatgacatgaagtgtttgaatgataaacatctctgttcacataaactgaaaagtacaatttgagatcatgtgttccctggactgtggttgatcagcaggtgggcagcctgtataagcatcctgtgtcctggcttgcatttcagagaggcagtaataggcacaacaccagtttatttccctctagcccacctgaggagggcctgtagctgattgcttcagtccttctacctgattcttcacttctttatggagattaatcacttaattgggactaggttgatctgtcagacaaacactttgggccacatgttaacaaaattgtttgagaacctaaaaattcgcaagtagttatgtttcagtactatctttattaaatctgtcataattttccttatgaaatgataataaatgtaattgttcttagttgaaaagttaatttagtatcattagtcatctggttccctggaattattaagtagtgtgagtggtatttgcaaaacaagtgaagacactttgttgttgaaggatagtatagacactagaggtacctttatggcattataattaatagtattctgggtgctcttatcttctgactcacagacatcctagtcacttggtcagtgttgtagtagtgattacatttagggtttatagtatatgaaagcaatttaagaaacgggaaagataaattgacatttttgtctatgtgtgtatatattaaatgaaaaacactgaactgtcatgtaatttatgaccgtactaccctgaataagcttgatcttttctgatctcaaaatctaagcagggtcagcctagttggtatctcagtgggagaatagtcagttcagcttaggttctgggacaggcagtatgacaggagactcactaagtcagggttgagggttctgtcttgtgatgatcctgatgttctgtagccaacagtggcttggcttacacagcttgtgttcatttgtcagagcttgaagactactcactgtatgttaataatacacgggtgaaaatatttgacagatgtatgcaaattttttttttttgctttattttgcttttttttttgctttattttgctttgctttccaagacagagtatcactatattcctttggctgtcctggaactcactatatactcctgggaggccttgaactcacagagatccacctacatcagcctcttgagtgctgagattcaagcgttggtaactagatctaacaagcaccatcaagaaaataaatataatctgggtacccaggagaaaaaaaaaaaaaaaaaaagaagatcaaagagttcagtggctttcctcattacacagtgaattcaaaaccagcttgtgcttgtcagaaaggagaagaaaagatggtcaggaagggagaaccctgggacttgcttcctggcctgagacgtgggaggggtctgacaacatgacacatgagttatgaaaagggtgaattactgggaacaagtgtacaacagggatatcagggagatagacaggaagagcaggagaagttgcccttgtactgaacctatgtaaatgtcttccttgtcacaattaccccccaaatatatatgtatacatataatatatataatatgatatgtaagtatatatataaatatatattggtacccatatatatgtatatatgatgtctatataaataaaaaatatatagtcaattaaacagtcatttctgtaaggccactgaacatattgtgatcatgttcattagaatatgtgccatttgattatagcttcttcaatcatgtggttcattcttagaaatatgcttgaaagagtattgggatgggatagggtaggcaatggttctcaacctttctaacgctgcaaacatttaaaacagttcctcaagttgtggtgacccccaacctataattatctcattgctacttcattactgtaattttgctgctgttatgaatcataatgtaaattcctgatatgcaaggtatctgatatggtgcccccaaggggtcaccacccactggttggaacactgggttaaagttattgtgttatctaaagaaagctctctcagccctttaggcaggggaggtttgctcctttgtcagtttgtatcttgttcctttgaggcagagtttctcactgaatttgaagagttgttttgttttgatttgtttaggctagcaaggcccaggccccagtggtctcatctccatcccactctggggttgcgcctgccgcttacatgaatgctgtccttgtctagtcctcatggatttcaagcactcttacaatggtccacccccccccaatctctgattttttaaaataagtcaaatcactttattctaattaactcacagatgaaaacaccatacagctggtttaaggaagccattcaaacacttgcccagagccaaactatgtatctcagcaaacttttatgcagttagaatcttgattctgcatcaacagagcttcacatagagttttacatttccgccatcaattatatttttatttcttatccaccacagcagagcaaaagctggagggaggcaaagttgtacattctccttcatggtccacatggaattagcctcggttttcttcttcctcattatttaatatgatgttctattagtctcctttctgaattttatactacacctacacttaacacctgttgacatatataatctatcagttgcatctacatataaggcagaatgtacaggagtgttgcttttgttttgtttgtttttcccctttctgagttttggtcatctcagaaagctctcagattttgaaaaattgccagagtctataaaagttaattaatgtatgtgattcttgccttaataataattttcttgaatcagtatccaagaatgaggttaaataattggagtgtaggtgtctaactcactagaaagatggtctcagtgcttggtacatggcctaacacagaggagtgacttaataaacgtatccagcaaaggagtgtacatttctgacagttccctcaccaagtttagaaccaatagaacatgttcctacttattatactttgcaatcagtgataccttgaaggacagatgtgtgtgcccccataaagtcactttaggaggctatttgtccatttctttggagcagctgtgaaattgattgtaaggtcaaaggagatagtctatctcccatagagtaggctttttgtacaagttctgcccttgagtgtactaagacttgagtgctacaggggaatgtaactgtgagagatggtcagcaactctgaccatacaaaagttagagagtagaagccaagcattgaaacacagatgcctcttttgatcatagtccttcactgagaagcactgctctaaaagcatcattgggaaagctggtatactttgaatataaactgcatattggattataatatttttccatcccaaatgttttcattatactgtggctttacaaaggaaagccgtgtgcttcggaatacatctaaaagtatttagagttaaattgtatagtgtctataggctattctctgtagttctataaatcaataacagttgtaactacaatgaccacaactatatattgtttatttggaaacagtggcaaagcttacttgtttcagggaaataataaaaaatccagctgacatgttcccgtcctagtgtggcctggctggccatgcactcactggctgccaatggccgacctgtttttatctcttggtgactctgattcagaactccacaatctctccacccagctctctaggttcccactggcagttgctaccacaccaaccctgtgcttcaaatccccggtggcctttgtggtgcacacctggcaaacccatgctttgtggccatacctttctctcttgaacccagacgagctaccgtgtgaaggaaaacacaatacaaacttagttcagaaacaatggtaactcaatctctgggtgcaacaactgaaacctaatcttgtaaaccttattaaaaaatgattcctctgatggcgaatccttgcagatatgccatgacaccaggaaactctagcacagctacatcttacccctctctgcccctggtccaaaacgacctaactctctcctgcttcctctctttctccgtccaacccagaagtcccgcctactcacccagtgattggctcctttattcattacgggattggttcacaagaatagcaccaggcccatccacaatacttattcattaatctaggagaatacaaaggcattttccatattctacattttcttttattactttttttttttttacaatctagttgttgcctcttttctagtcctccctcccatagtttgtcatcccattcctcctcccctctgcctccaagaggatgtctcccacccacccacccctatcaagcctccccactccctggggcctcatctctccagggttaggcataccctgtctccctgaggccagaccaggcagttctctactgtatatgagttgggggtctcttaccagatagtatatgctgcctgattggtggctcagtgtctgagagatctcgggggtccaggtgatttgagactgttggtcttcctatggggtagccctcctcttcagctttttcaagccttttcctaattcaactaacaggggttccccgacttcggtctagtggttggatataagtatctgcatatgtctaagtcagctgcttgttgagcctctccaagagcaaccttgtgaggctcctgtctataagcacaccatagcattagtaatagtgccaggccctggagcctctccccttgagctggatcccaattagggcctgtcactggaccacctttcccacagtctcttctccatttttgtccctgtagttcttttacaggaacaattctgggtcagagtttttgattatgggatggcaactccatccctccactttatgccctgtctttctagtggaggtggactctacaaattccctttccccactgtagggcatttggcctaaggacactttgagtcctgagagtttcccaccttccaggactctgctacattctagagggtccccctacctcccacctccaatattacatatttccattcattctgctggccttcagggcttctctcctgtctccccccacccttaatacctaatcatgttccccttttccctcccctttccctctcccattcagatccctccctccctctatctcctgtgattgttttcttctctctcccaagtgggattgaggcatcctcacttgggccctttggcttgtttacctttttgagttctgtgaattgtatcctgggcattatgtactttttggctagtatccactaattagtgagtatataccatgcatgtccttttgggtctgagatacctcacttgaaatgatattttctagtttcatccatttgcctgcaaaactcatgatgtcctcgttctgaatagctgaacagtattccactatgtaaatgaaccacattttctgtatccattcttctgatgtgagacatctaggttgtttccagcttctggctatcacaaataagactgctatgaatgtagtagaacatttgcccctgtggcatggtgggtcatcttttggttatatgcccaagagtggtatagctgggtcttcaggtagatgtatttccaattttctgaggaacctccagattgtttttgagagtggttgtaccagtttgcaatcccactagcacatccttgccaaaatgtgctgtcacctgaatttttgatcttagtcattctgattggtgtgaggtggaatctcagggttgctttgatttgcatttccctgattactaaggacattgaacatttctttaagtgcttcttggccatttgagatccctctgttgtgaattctctggttagttgtataccccattttttgattgcgttgtttgggtttttggaggttagcttcttgagttctttgtatattttggatattagccctgtattggatgtggggttagcaaagatttttttcccaatctgtaggttcaattttcaatttcttcacttgtttgattttgttgtcttgtatttctttaagggatttgtttcccctttaaaggcttctacctgttttcgttcagtgagttattcatatcctccttaaaggattctattatctttgtgagataggattttaggtaagcattatgcttttcaagtgtgttaaggcatccagggcttgctgtggtgggagaggtgggttctcatggtgtcaaagtatattggcttctgttgcttatgttcttgggcttgcctcttgccatttggttatctctggtgttaactggcctgagtgtctctgtctgcagcctgcctcctgtgtcccttggttgcttgaggtctcctgggaggccttcagactgtggggtcttcagaggagcagacatgctgctgatgatctgccctggcagaaggagcaggctggaaaggaggtggagttcgagcagaggaaatgagtctggagtcccctgggctccttgggacgtcccacctgctgtggttatttgggagggtcctttacctgttgctctgggtgcagcaggtctcctgagaggcttccagagtgtggggtcttcagagggacagacatgctgataatcttccccagcagaaggcccaggccaccaaaggcattttttgaatattttcttcaagtctaaaagtatttcagagtggaatggtggtcagttttagcacagggtctattattttagcaagctacaaacccatgtacagaaaaaataatctcatgaaacatggaggagaagcaactcagatcaaagaaggtattgatcatgcctgctttcataaccagaagaatagacatacaaagacctacagccactactcttaagttttgttttgatttactgatttttgtttgttttaggtagagtcccaggtatccctggcaggcctcaatgtcactttgtagctgtgtctgcttttgaacttctttagctcccaagtgctagaatctcagaagggtgccactattcacagcctttctgtctttaaatgattccatatgaaggcctctttatacaaaatcctatgtagctgtggcagatgatagaaagctgagaccctacaggatgggacaaggcctccacctttaacccgtattatgccatccttggattgcataaggcgcccattcctaatctacaaagacagagcctgcttaccaacctctctccatgccagttgcaaacacagaaaccctaatcccacctccccgctgcccccaaatatgtgatgtattctatcaagactacccagtgatcccctcaagcaggaacatcctaacttgagtgacctgtgtttagcccacagtataactctcctgatttccattagaaaagacacagcctccactccatcatccatatctttattcttcacaagtgaaacaacttcctttagcaaagtaagcagcctccttacaaggctttcctctctagggcttggtttgggaagatttgtctgattttttatccctaggatacctttgtgtttccatgaattcacttatgtttcatgattgtaactagtgactagcttgaaaagctgaatattagggaaacaatgtctgagtcatggacagcctctccaaatggctatctgattttccctctccttttctctgctgagtttttactgcttatcagaaacaggattttcagtgggtagcctgcccacttccagagccctctccctaagccacttctgttcttgtcacattccttgtttgttctgaaatcttaatctgtcttttctagtgtttatccttaacctgcttcttagcttgcatgctaagatttcccttcagcttgttctaatgtgtttttggttgatctgccactgtttgagccagttgatgaaccacctctaaattcctagtatttctgccctattctgtctgaaatgtcttgactttccgtttagacatctcttattcttttttgtgatgtctcttagttttcagctgagtgggcttcaaacattatagttttttcttagttttgttttaacttgtgtttctcatattgtatttgccatattcttcttggcagtttggttctacttcctttgttgtagatttctaacttctttagaacagaaagtataaatattctacagaaaacagattttctgcgatagaattgctataattttgattgatatatatgatattacagacatgctagtgaatgcttgtaatcacaagctcttggggtctgaggcaggatagttaagagttccagggtagccggggctaatctgtttatcaagatctatcattgaaacaaacaaataaaaccctttattcttagaaggaagaggagaaaaaaagaggagaagcaggaggagtagtattatcattagcattatattagccagcctgagttaataaattctgggagattcttatctattagtcataagatgttactttcaacactaaggtggtcatggaattgctgttctggctgctcaagataaggtaattagtgtctggaccagtaacactacaatctctccacagtacacttgttctcagttaatttttcatagtctctgcaaacacagcttcttttcaggagttgatctttacatggggaaattccattttctaataaatcatataaaccaggagcttgtcaggaatgtgatgggaatatttgcctgtcaacatttaagttggatttagcagtaaatccacctggtcctaagatttatcttgtggagagacttgatgacagctttgatatcattgattggtaatgagtctgtttaagtgctgtgtatcttgtagctttaattttagtaggtcacatgtgtttaaaaactcatccatttcttctaggttttccagcttttaaagaataagttttcaaagtattctctaagtatgttcttggttgtattagagtctgctttaacagtacctcttttgtctccaattttgttaatttgcttttccccccttactactttgactgaaggtttgttaatcttactttttcaaataactaactcttgggttgtgtgtattgttggagtttttttgatgatggtgttggtttttcattttgtgttttttgctttgctttgcttctacagaacagctctgtagctgtggctggcttggaactcactaaatagaccaaatggccttaaactcaaagtccactggcctttgctcctccacatactggaaatgaaagtgtgtaccacctggtttagcatttattgtccgtaaaaagcaataaataagtcacattcatttatttcttgatctatattatttcttgctttctactactatgttttctattggcttatttttttccagagccctgaggtacaacattgtttattgtatattgttctagcttttaatgtacactcttaaacctatttattatgtttcctctaagaactgacttgactgtatcccaaaggtgctggtaaagtatattctcagtttcattttgagtctaggaattttttttaatttcttctctaatttcttcgatgactctcttttcattcaaagtatattgttggtttccaagtggttttataatgttttttgctgttgattagtttaattacactatagtctgatggaacacatgccatagtgccatttttttaagctggtaagtttatttgtgatccacagtatggtcaatttgttagaagggtctatgtgctagaaagaagaatgtattccttatctgatgagtggaatattctgtatatatctgttaagtccacttgatttatggtgtattttagctctaaagtttctttgcttattttcaatttggaagagccatccgattattaaagtctcccactaatgttatatttgaactaatgtaggctttcagtgtttgttttatgaaactgagcgagtctaatatttagagtgtagatattgtattagtctgggttctctaaagtcacagaacttatatatagtctctataagtttgttggtgactcatcaatttgttgatgactgtagtccaactcctcaacaaaggtcagcaacagctgtgaatggaagtccaaggatctaacagttgctcagtcccacaaggcaagcaggcaaagaagagaaagcaaaatcttcttccaatgtccttatgaaggtgtggcccagatgtatgtgccaccacacctggatctgggacttgctttgtaccagatgaccttgaactcagagatctccctgttttaatcttctgggattcatagcctttatgccccaagatctccatgccaagattcaggtcagaaacttgtatctcccagcctccagattaggatcacaggtgtgccttccaattctgggttgtagttcattccagatacagtgaagttgtcaaccaagaatagcctctacaggtattgacagcaattgtgtcttttgtatgttttaattcaaatatcattacataggtttccttctacctttccagctccttcctgtttcatatcccctccactctcaagttgataggctcttttctttgattattgatgttcattcttgcatatctatggctacacttaaaaattatggcgaatatgagtatatttcaatatctattctttttcaaaatgtatgtgtatgcatataaggctgcatgaatttctatatactaggtatatgtggctgcatttggagaccagaagagggaatcagattctctggaactggagttatagatggctgtgtaatataggtgttggaaactgaacccaggtcctgtgcaataggaatatgcactctacactgagcttctttccagctccacaaccgttacatcttcttggtgcattgtttcctttattaatatgtgttgatccttctttagcaatctaattagttttggtttgcagtcttctttatcaattgcagagatagatatgtctgcttatttatggattttttttacttagtataatttacatcctttgatcaatttacatccatttttctatgtctttgaatggttcttatttttccaatccagttgatttgtctccatatttttacttgtcaacttagaccgtttacatttagtgtctttattgattgtttataaatgttttagagaatagtttcctggattgttgtttcatttaatttttctgaatgaattttgggagtatgattacttcctgttttagataacattgatttttttctagttccttttgttcttttcataggatttatacttttatgtgttcatgtggggaagtgtcttagtcagggtttatattcctgcacaaacatcatgaccaagaaacaagttggggaggaaagagtttattcggcttacacttccatactgctattcatcaccaaaggaagtcaggactggaactcaagcaggtcaggaagcaggagctgatgcagaggccatggagggatgttccttactggcttgcttcccctggcttgctcagcctgctctcttatagagcccaagattaccagcccagagatggtcccactcacaaggggcctttccccctgatcactagttgagaaaataccttacagttggatttcatggaggcatttcgtcaactgaagctccttactctgtgataactccagctgtgtcaagttgacacaaaactagccagtacaggaagggttttttaaattccttctctgtagtattccttttaaaaatattatttagtgctgatttggctgtcatgaattgccttacattttgtttgtcagaaatatttttgttttttcatcaattttgaaagggaacttgctacgaaaaaacactcttgtttcaattcacagttatttactttcagagcttaaagtatctcaatgcatgcttttctagctttatagagtagataataacggaagtagttctgataactgtatggtacaaaggtacatgagttgttcttctcatatggcattgatatcttcactatgatgtatcatggggaattccttctagggtcatttctgtttaggattctaaatttcttttgtgtttgaatgtatactccattttctagatttagaaagttttctgctttaattttattaagtctctgtgttacttatttacaacttatctgttactgtgataaaatataataaccaaggcaacttaaagaatgcagtgtttgtttagtcttatgattccagaaatggtagaaatggtagggaaggcacagagaaggtactgtttagattacattgtaggggagttaaagcagttgagttcatggttaggagctgtgtcatattctttggatttgttattgtcatgttgtgtgcgtgttggaatggactgtcttccagtttttccttgcttccaattctatttgattgtgttgggtttttttattaggtattttcttcatttacatttccaatgctatcccaaaagtcccccataccctcccccccacttcttggccctggtgttcctctgtactgaggcatataaagtttgcaagaccaatgggcctctctgtccaatgatggccaactaggccatcttctgatacatatgcagctagagacacgagctcagggaggtactgggtagttcatattgttgttccacttgtagggttggagacccctttagctccttgggtattttccctagctcctccattgggggccctgtgatccatccaatagctgactgtgagcatccacttctgtgttttgctgggccccagcatagcctcacaagagacagctatatctgggtcctttcagcaaaattttgctagtgtatgcaatggtgtccgagtttggaggctgattatgagatggatccccgggtatggcagtctctagatggtccatcctttcgtctcagctccaaactgtgtctctgtaactccttccatgggtgttttgtttcctattctaaggaggggcaaagtgtccacactttggtcttcattcttcttgaatttcatgcgtttagcaaattgtatcttatatcttgggtatcctaagtttctgggctaatatccacttatcaatgagtacatattgtgcgagttcctttgtgattgggttacctcactcaggatgatgccctccaggtccatccatttacctaggaatttcataaattcattctttttaatagctgagtagtactccattgtgtaaatgtaccacattctctgtatccattcctctgttgaggggcatctgggttctttccagcttctggctattataaataaggctgctatgaacatagtggagcatgtgtccttcgtaccggttggaacatcttctggatatatgcccaagagaggtattgcgggatcctccggtagtactatatccaattttctgaggaactgccagactgattttcagagtggttgtacaagcttgcaatcccaccaacaatggaggagtcagtgttcctctttctccacatcctcgccagcatctgctgtcacctgaatttttgatcttagccattctggctggtgtgaggtggaatctcagggttgttttgaattgcatttccctgatgattgaggatgctgaacattttttcaggtgcttctcagccgttcggtattctttgtttagctctgagccccattttttaatggggttatttgattttctggagtccaccttcttgagttctttatatatattggatattagtcctgatatttccaagacttttatcattaatgcgtgttggattttgtcaaatgctttctccgcatctaacaaaatgatcatatggtttttgtctttgagtttgtttatatagtggattacgttgatggatttccatatattaaaccatccctgtatccctagaatgaaacctacgtggtcaggatggattattgttttgatgtgttcttggattcagttcgagagaattttattgagtatttttgcatcgatattcataagggaaattggtctgaagttctctatctttgttgggtctttctgtggtttaggtatcagagtaattgtggcttcactgaatgaattggatagagtaccttctgcttctattttgtggaatagtttgtgaagaactgggattaggtcttttttgaaggtctgatagaactctgcacaaaacccatctggtcctgggccttttttggttgggagactattaattactgcttctatttctttaggggatataggactgtttagatcattaatctgatcctgatttaactttggtacctggtatctgtctagtaacttgtgcatttcatccaggttctccagttttgtagatggatctgatggtgttttggatttcttcaggatctgttgttatgtctcccttttcatttctgattttgttaattagaatgctgtccctgtgccctctagtgattctggctaagggtttatctatcttgttgattttctcaaagaaccagctcctcatttggatgattctctgaatagttcttcttgtttccacttggttggtctactcctcttgggtgagtttgcttccttttgttctagagcttttaggtgtgttgtcaagctgctagtgtgtgctccctgtagtttctttttggaggcactcagaggtatgaattttcctcttagaaatgctttcattgtgtcccataagtttgggtatgttgtgggttcattttcattaaactctaaaaagtctttaatttctttctttgttccttccttgaccaaggtatcattgagaagagtgttgttcagtttccacgtgaatgttagctttctattatttatgttgttattgaaaatcagccttagtccatagtgatctgataggatgcatgggacaatttcaatatttttgtatatgttgagtcctgttttgtgaccaattatatggtcaattttgaagaaggtaccatgaggtgctgagaataaggtatatccttttgttttaggataaaatgttctgtagatatctgttagatccatttgtttcataacttctgttagtgtcactgtttccctgtttagtttctgtttccatgatctggacagtggtgaaattggtgtgttgaagtcccccactattattgtgtgaggtgcaatgtgtgctttaagctttactaaagtttctttaatgaatgtggctgcccttgtatttggagcataggtattcagaatcaagagttcctcttggaagattttgcctttcatgagtataaagtgcccctccttgccttttttgataatgttgggttggaagtcaattttatttgatattagaatggctactccagcttgtttcttcagaccatttccttggaaaattgttttccagtctttcattttgaggtagtgtctgtctttttccctgagatgggtttcctgtaagcagcaaaatgttgggtcctgtttgtgtagccagtctgttagtctatgtctttttattggggagttgagtccattgatattaagagatgttaaggacaagtaattgttgcttcctattacttttgttgttagagttggnnnnnnnnnnnnnnnnnnnnnnnnnnnnnnnnnnnnnnnnnnnnnnnnnnnnnnaattgagagtttggctgggtatagtagccttggctggcattggtcttctcttagtgtctgtataacatctgtccaggatcttctggctttcatagtctctgatgaaaagtctggtgtaattctgataggcttgcctttatgttacttgacctttttcccttgctgcttttaatattctatctttatttagtgcatttgttgttctgattattatgtgtcctgaggaatttcttttctggttcagtctattgggagttctgaaggcttcttgtatgttcaagggcatctctttctttaggtttgggaagttttcttctataattttgttgaagatatttgttggccctgtaagttgaatcttcattctcatctactcctattatccgtaggtttggtcttctcattgtgtcctggatttcctggatgttttgagttaggattttgcattttctttgattgttgtgccaatgttctctatggaatcttcttcacctcagattctctcttctatctcttgtattctgttgctgatgctgtcatctatggttctagatttctttcctagggtttctatctccagcgttgccttactttgggttttctttattgtgtctacttccctttttaggtctagtatggttttgttcatttccatcacctgtttggatatgttttcctgtttttctttaaggacttctacctgtttggttgtgttttcctgtttttctttaaggacttgtaactctttagcagtgatctcctgtatttctttaagtgagttattaaagcccttcttgatgacctctaccatcatcatgagatatgcttttaaatccgagtctagcttttcgagtgtgttgggatgcccatgactgggtgagttgggagtgctgcattctgatgatggtgagtgtcttggtttctgttagtaagattcttaagtttacctttcgccatctggtaatctctggagttatttgttaaagttgacactgattagagcttgttcctcctttgattctgttagcctctatcagcagacctggtagactagttctttcctgagtttcagtggtcagggcactctctgcaggcaagctctcctctttcagggaaggtgcacagatatctggtgttcggacctgccttctggcagaagatgaattcctgaaacagggcctgtcccagaagctgtgtcactttggcctgtcccagaagatgttagcttctgttttccacaatctcacctgcgcagaatagtctcggaatgatcccccaggtgctccggcaaagccctcccgggaggggctaacacctctgctctggcagggaatgtgatcggatgtctggagcccgaaacagggtctgcctcagaagctgtcctctagggaccttgggggtgtccgccgactccgtcctcaggtgaccccgtgctggcgcagactggaagggacttgtgaccctggtcaggctgggttttctgcttccctaatgctgtctcagctcccgtgagattggattgggacagaagttgttttccactcaccagagatcctaaaattgctgtgtagtttttattttattttattttnnnnnnnnnnnnnnnnnnnnnnnnnnnnnnnnnnnnnnnnnnnnnnnnnnnnnnnnnnnnnnnnnnnnnnnnnnnnnnnnnnnnnnnnnnnnnnnnnnnnnnnnnnnnnntatatgggcatgtacccagaaaagccataagaggatatcacatcccctggaacttgagttacaggtagttgtgagctaccccacatagatgttggaaattaacctcaggtcctctgaagtagcaacacggagtcatctcttcatctctggttgtttggctttctgtgattcttcctagaagaatgtccacatgaagttcagtttgggaggcaggtgaaactgttagttgggaggtgggatccctgagtgatcaagtcttgggtaggtggcagcaggaccgaggttggagcaacaccagattctggtaaaaattccattgcacattgtattctaccaaccctctggggccttgatttaaatgtggcagcctaagaatgaccttgaacttctgatccacctgtttccacctctgagtgctgggattacagtcatgtgccaccattcctggatttatttggtgctgaggatcaaaccttaggaccccatgggtgataggaaacactccaccaactgagctacatccccattgataatttatttttttaatacagactagttaaataagtagtgagtagtattccaaatgtgattagttttaagtaagatttatctgccatggaagtaaaactcacattttgacttgaagtacaatttccaattttttaacttgaagaagaatccattttgttttcattttcctcattccaatggatgatgtttttgtttttgttttgaatgtccttaggcactgttatgaagtataataccatgagggggtacctggtgtgtccctgccaaggtgtccccctaagaaatcacaccatggaacagatctcatataaagggggtttatttgagggaaggaatgggagtccctgttggcagtccttctgggctctaccccatagttacctggcaacagtcaggtatgcctgacagtataaaaggggctgcttgccccctcactctattgctcttcctctcttcccctcttccttctctgtcccttctctccccattccctccccacatgttctccttccccttatctctcccctcatcccctctcctcccctcttcatgtcctaaataaactgtattgtatagtatacctctgactggtacctcagggggtagggatatctcagcatgggcctgcagaggcacccattcccccacaccatatggtgcctccaccaaacatactcctggcatcttgttctgttttataaaacacaacagtccaggcctaaagaatgggtagagttaggcagaggacggcagaaccatgaagtcagagaagaagggacagagaaggacagaaaagtgaagaaagggagacacacacacacatacatacacacatacatacacacacacacacacacacacatacacacatacacagaggatggggggtggggcagagatgatacacatgggaacagagagaaagaactggggtagtgagcagtcctttttatagactgcatgcccctggcctaggcaggtgatgacataagccattgctaggtccctgggagctaacaggcacaaatgtatatgtgtatgtgcatatgcagctagatgccctatattattaatgttggaggccatacgaagtcactcttctactttattattgagactaagtcacacccagagcttgctgatgaagttagtcatgatgatagcttgtaggttgctcactaaataggcacacacacaaaaaatggcatgtgttccttccaacaccctttcttcctcttttctttttcctcatgcactaccttcttcttttcctttttctttcctctttcctttcttctatgcaaagtttgttgctgttgtttttcactttgaaagaagttctgtcccttgctttgatcatggccagcactaaaacacagcacagaggttctctgtgtgatttaatgaaggccttagctatctcttctcgggggtttagctgaaggccagagcttcccaaaaggcctgactgggaaggagtggaatgcagctctgacatcacagcctcagctcctgggaatgctttgcattcttcttcctggcagtggtgtagtggcttccagcaaggaaggagtacagttccaaaaagaaagaaaaggggggagagaaagagagaggcagaagaagagagagaactggttataatgaaactattgttgtttgagaggtatttttattctaaaccaaattagtaattgcaaccagatgtcttagattttgaagctcctgaaacactgagtttattaattactttaatagctgaactgtcagggtttttgcttgaaaaatcttgaaactttttaagatttaaggggactggtttacaatatctctgtagtttgattggttgtggtttctgtaatggtcttcatctgttgaaagagtttatttgatgtggggtgatttttcacacagtaacaacaattaacgaaaaaaagagcaaagagggtatatgggaacgtttggagggagaaggggagaattatacattatgtataatctcgaaaaataaaaaatacacacacgtatatgtttgtgcatatgtaggggagggggagaggggagagagagggactgctgagagtgatagagtgataatgcacacctttaattgaagcgctgctgtggggtgtggcagagacgggcagatcgctaagcctggtttatatagcacgtactagtcttgccaaggctatatagtgagacctttcccaccacacacaaacagagacagagagaaacagagagagacagagacagagacagggagacaaagagaggcagagagagagagaaagatagaaaataattaaggaaaaagcatctttcctgctgtgcatcaagaaccctgatgaactgagctgtagacagtatgcaagcagttttgaagcttgttaatctgaaaagttacttttgaaacaaaactgcaatctactagtgaattttgtgctgtttggctgtccactgggagaagaaaaccattctactgtctgctgtagagtatttgtccttaggggattgggttcccagtgtcatttctggtccttaatctagtgttccaagtagacacccaaaacaacattaagacgttaaagagcctggtgcagcctgtgcatgtaggcagctcctgaacagagacacgaaacagagtgtcacttcctgacttaaactttaaactcaagttgtctttttcctgtctcctactttctaaaaagctgtgtataagtttagatactctcaacttgtttttctgcattttagaaataaaatattaagccctttaaaaatatgctgcatagttccctttgactatcacataaacaataattctcaagttaggtataaacccatttgagtacttcctgttgtacagaggctgagtcactagtaaaagttgtcagaaatgtggaaaagtgcatgccagtaatgtcatgtatcctcatccattggcagcatggcttttggagattttcttagagttcttggctaaacaaaacaaaatatgtggttctaattctgttttatttttggaagtaagggtgggtgtagaggacagactattgcttgagatgggttttctgttagtttaaaattggccaaagttgctaggcatgtgtttaagtgtatacttttgtatagttcattaggatttggtcaacaagtttttttatttttttgttagaaataaaatattttcatacaatatattatgatcacagtttttcctctctcaagtttttccagcttctcccctccttcctacctacctagctccatagcatctttctctttaagaaacaaacaggcaaacaaaacagtttaaaataataaacaacaaagagaaagcacaaaacataagcatacacacaaaaatatttaaaaagctataaaatacaaaattggaaatcataatgtatgatcaaaagaccaatcagacagaaagtgtccaaagtagtgagacagaaagtttacagaaacaccattgggtttcctgtgtggtggccatctactgctggacatggggcctgcccttatatgtggttaatatccccagtgatatgctattggagaaaactagtttttctttgcatgtggacatcagtaggagacagcttcttaggtagggatgagtaattgtatccacttcctgctctcagtgctggcaccacatgtgatttgaacctgtgcaggccctgtgcattataccacagtctgggtcttcaaatgtgcattagtcctattgtgtccacagacttggtttcctcagtgtcatccatctgctctggctctgagaacctttccacctcctcttcaccatagctccctgagctttgtcatggggagaagggtggctggttaaagacattctgtttaggactagctgtttcaaagtctcttactctctctgtcttacataacaacacaactgttgttctcttctcctttgtaccccatgggtgacctacctgactactcagactggtgtgctggctcctgcctctaagtgcaagtcatatctttgcttgtatataaagggtaggtctcattgcaccttctgccataatacctagaaaggcctgactctaataccaatttcctaaattgccagaacctgaaagtattgataagtttgtcattcagctggtaggagagtggattcaaatccatgctatgtgttctttggctgggattctggagctattgagttgctggttggaagtaatttgaatagaatatgcccaaagagataaaaatttagaaatttagtctaatggggaagttgtaagaaacatgtgacaggtatacagcttcttaaaaggaaaaacaaatatgaatgaagttttggagggttgagggtgcaaggaatgggccgattatgatcaggatgttgtgtgtagggaatataaactctctagagttctcttcctaaagagacgccaaaacaaataacccagatggtgatggttattttaattaaaataaaacccatgtgtacttgtgttgtaatgtatacatgtgttttcatgtgaaggtggaggtcaaaggtcagggtcggcatgagttcattagtcactttccaccttgttttgttttctgtttttgttttaaacagtctcttcactgaatctgaagctcatcatttctgctatgctggctggtcaagttcttcatttctatagctctccagccctttccaccttgtttggctttttacattagtactggaatatgaaattaactgtgctggcatgtttactagacaggtactttaccacttaagccatgcccccagccactgcagtcactttatataggtggaaatcttgtcattagagtggggagtgttctgtgttaaggatgagtgttcctagttagtaagaatggaaaagaattggatcctgaaggatggacctgttactccagttgtacgctttcctgcaccacttgtgcttcatgactatctaccctttttcctcgaatctgggagcaaataaatccacttattttctcctcttggttgaaagtttggctagattcaatgtggaaatataaaaaggacatcttcacatgatagctgttctagtgaccctgggctaatgactactcctgctatgttgattaatatataagtgtattcacaaagaaaacaaatcactgacgtaaggaaagtagcttaacttgtaaagtgcttgcctagcatgaatgaatccctgagttttatcttcagtactgaataaacttagtatagtggcacatgcctatgatcccacactcagtaggaaaaggtagaaggattagaaattccaggtcttaggaacaaaggagtttgggaccaacccctgattcaaacaataaagctaaataacactgtgttgagtgcattcagtattcagtattgtttgattatttaaaaagaggactaggaatgcatgagcccagtactcaacatgaataaatgtctaaacaaataagcaaataaaagttaagtgagtaagatagagttcagcagtggtggcacatgcttgtcgtcatagctgtgggaaggggaggctgaaacaccaggatattagggtcatccacctctactattccactagatgtttgtgtaactaagttatttttagaaatgtcagttatgatgtagatgagttgatacttgaataatgttgcagggaaaatgggaatatcagagaaagcctagcacatgcttacactaaaatattatccgtttgtaagtcacgcattaacatataactatgcatcttgtattttatttaaatctcacaactttacacttaaagctagcatatgtaaaatattacaatcagagttgttatagtcagggttccattttgtgagtttttaatcttgttgataaaagaatttaaagacaacatcagaacaaagaagatcattttattaaaattttggagaaagacaataggtcttacaattttaattcttggtaattgctaagaggaaagaaatgcttaagagagaaagataaaattcatttttacaatagaaataaatcttgttagtcttcatggattagattagatttaattttgtaagtacctttacgagtttgattatttgtttattatcaacttggtacaagctagagttgtctgggtatagggaatgtcaattgagaaaatgtctccattagattggcctgtaggtgattctgtcggacattctgttaaagattgatgtgtggggtcataggtcaaataatttaatccctgtggtctgaaataactctggaattggtgagagaatgctcccacaattcccactatgcctttgggtcctgtttctcactaaattgtgagattgagcagaacaggatactaatactctctagaaagcttgtgagtcctgatcctgacctgccagaaaacttagttcttagtgactaaggtaactctcagttcccaaactgttgtttcctattgatttggctttcagatgtattctccatgatgaaaacaacattatcaccaagcctaaaaagaaaaattaaacttgactttgtttaacttactaggcaatttatatcaatttttggaaagtgtgactaatagcaatttgacctttaaccccatgcctaataaatccattttggaaaagataaaaagcaaccagatgtgctctatgtataagcttttgttcaaaactagtgtaaatgatttttgggtgtctcaacgaccaaaattgaagtccaaaagtaataaatacatagggctaagaaggcagtcaatatattgacccttgcctctaggccagataggtttcaatggatagataacaggacatctctcaacagaccctgtagttctgctaaatgacctttctattgatcaaagaggatgtaaagactcagaggcaagccagtaactaatgcacattttgcagagtcagcagtgggaaatgaaatcaattcttcctagcaaatcaacatgatcagcaagtgtctgacctgtcctaccagatggtataactagtaaagtctataggaggatggaactccctaaaagaaagttggaggaggaactcagagcaggaactgaagcagaggcaatgaaggagaagtgcttattggcttgttcctgtaggcttgcttagcagtctttttatacaacaacctatgtgttcaggacccacagtctccttgattagtaggaatcaaattttattcttttctttgtttaaatttggtaaaagaatgaataagtcttttagatatggcagtgatgtcctttttttaaagatgtggactggttaggaggaaacccaaagagaaagagccacttactctgaccacagtgtgttggaagtttataaccatgggggaagtctgagagagccagttggtcccttatgtaaaataacttcctcaaagcctgaaaaccccacagtcaggtctggtttatataactccttgctctgatttttaaaaatgaataaataaaaaaataagaaaaaatagaccttgttatatggcaataggacacccaggaaacatacatatgtatagccaccatttttaataaaatgcatttaaatgagattagtataaatataagagtcttaagtacttatgaagcaagagaaagtggcctggggtatacagcccgaaatgaggaaagagcctgtagtttatcacagcaatatatacacagaaggaaactgtaagtagtaaggaatggagagttttagcatcttgacccaaaggagtagagtccatatcttcccactatgaaggtgaaggaaatctatttgtaactaggaacatcaaatgatctcattttggctttttcctcagctcctaggtctttagttttccacgatgcttttgtgctcacaaaagaactgggagggatcaggaagtgtgtccaacatgaatttgcactactgcgttgggagcacatggaggcactaagggagagaaagcatattatgatgtggatactataacctaccttaggatgaagtgggctgagactggacagtattagctgagcagtcaagtccttcagaaatgaagttgttaaaaaccgttaatcttggttttaatagctcagcaagttatggggcacttctgtccaattagaaattcaaacgcctggggatttagggcgtgtgttcaactgagagcacagtacagatagtgcaaggcactgcctgtactctccattttggttagaaacagaaggtgaagtccaaaggtcattataactgagtgtccatcctctgtggccttcaagcctgataatacttgataatgtatcatgatataattaagacatactctgtcctcccacacctaagtctttcagtttgtaaaaactgttcatcatttctcctattgtttcctcacatacatatacagtttaatatgtttgtaactgacttttagcttactgatttatgtgctagaccaaagtccctcttggcttctataattacagcatcattttgggaaggctggccataggcagctggcataagtccagacctctcttgaggccctttgcagaactagaggccagcaacatttgtacatatgtgcatcttcttgaagttgtttgatagccttggccaactctggaggcacaagaaaccggcataggaaccaactggcacagttatgatgtggttgagccaaagtatgtggctgtccaagttctctcagggcctcagcattttcatactaacttatcagtggtcgagagaacaagaggggaattgaaagttggcatgaagtcagagtgaactcagagattagaagggagttggtagaatgattgatgagctcttattattcaacaatcagtaaccaagagagagagagagagagagagagagagagagagagagaggagaaaaaaaaaaacgaacagaagtgacaaggctacaaggctacagctctctaccaaaaggtggtagttgttggaattcagatatctcttgcaatttctgagtataatgtaatgaatgaagattagtctctgtgggaacatttttaagaaggaaactttactatgcaaagaattttatgaaaggtataaaggccacagtgtgaattgaggatgacacaccctgttttgaattggatttcctgctagctgtgatcagaggcattcttcccggactagggtgaattcagttccagtgtttacttgtaaaactgaattcagtcattgtgtttgtactttggcgtcctgcctgcaattaaaagtacagagcagacttcagttagttaccctctatgattttgtgtcctttataaagaggagggagaggagaggggaaaacccaagaggtgactgagttcatttacatacagtgccagtgggcagctgctggctgcctgtggtcacatgattctgtggaggattctgatattccacttactggaattgggagtgggacagagaacactcccctttaatacttccagttttgtcatagctgaattattacttgcttctatgttattaataaatgcagatgaaaactttttttggatattttattttttttacatttcaaatattatcccctttcccagtttctcctttggaaaccccctgtctcatcctccctcctcctacttctatgaggttgctcccacacccacccacccactcttgcctccctgccctggcattcccctacactggagtatccagccttcccaggaccaaaggcctctcctcccattgatgttcaacaaggccagcagatgaaatttaggatacttccttttccttgttctttttaaactcttgtgtatgtaaaaacgaacttctaaaaggagaggttacaggccctgttgtagagcctggtgggcctgtctctcagttactttagagggaacacaagcaacggacacaattgattaaagttatggggattatctatgggatggacttctcctctctagagtcatagaaaccagaaaagtctctgttctttgtagtttgatggttatatgaagatacctggcaactactatagaagatggatctgaatggattgtttttccagtgcctatgaaagcaagtcagccctcacaccctaagaggtagtatattgaatgatttccttgattcaaatttatagcctctggatttggaaaagacagagaaaaggactggtctttgggggcctgttcccagaatttactatctcacactaaagatgaagaggtcagctcaggacctttggaaaattcccctttcccctcctagaagagcgaggacagagagcctataggcacctctctcctccagaagcaagaggctgattacattcttcaaaaagaacacaggcgggaccaaccattggccatccgaagataaggaaagcctttgctacctcattccctaaggaccagtttaaaagtcacactgttctgccaatcacattgtgcctagtgactgttgcccaatatacccctgaaaattgtataaaacctggctgaacaggcagtccagggtcactgcctctccttcaggtgcaggacgaccccagcactatggaacaataaattcctcttgcttttgcgtcgatccccagctccgtgtggttcattgagagggtccctggttgctaaggttcatcaaagtcttataaaaaaaaaaatctcgagggctgaaataaggagcagtggactgtctgtgtcttatatgtcatgaattgtacttctttttactccagtttgtctctgccagacactctccctctcccactgaaatccttcttctcagcaaggcttcatcctaatttcatgtattttttttttttttgtgtgtgtgtgtgaaccactgaggtaaattagggttgcctatattagcatgggtgagagagaatatttactggagcatgggcagtttatcagtggttatactactgaagaaaatggcactccagccttcacagcaagcaataacacatccatgatgaaatattgactttcagtctacaatcttgtacagttcttatttcagtaacctcagctgtagtgagctctcttaggtgcaaagtcttgcacttaacatttttttatgtttttttttttaattttatatcttggatggaagaacaaactcatttgtgccacagcacacatatggaggtcagagtataatttttcatgtgtgtcccaggaatcaaatgcaggttatccaatttggtgacaaatacctactgaaccatgttgccagatcccatcagagcattttgaggccagagatcccacagttacttccaacattggagtggctatcaagtaggtatagaaaatcacaaacttctataagcaatcatggtatgaaaacttaaactaattgtcacattactggagacctagaataaacaaagctcaaaaaaggaaatactccaaagatcacagacctgggaagagaggtacatttattggagttttagctctaggaaccctaattgcttttcacaatcaacacctgaggacatgcttcttctttcttccacaatgatccctgagccttggcaagaagaggtgtattttagatgtaccatttagggccgagaactccagactcttattctctgcccctgtactacttgtgggactctgttaaacaccatctactattgaaaaacaaagctgcttggatgagatttgagagatgcacacacagcacacaggtgtagcaatacgttatttggcggtgctttaggagagttagagcagtaggttattccctagtgcctatgacctttctagccacaggttcttggcctcgatatggtggagcaggcctttaatccgatttttttaaaaagtaatttttttattcccgtgacattggtgcaactgtcggaacagtggacatgcctcgccaggcctataattacagtagctttcaaggttctcagctgtaagtcagatgaccgttgatatactatggcagcatgcacagcacctgccagcattatgaaaggcagctgttaggagtaaaggaacttctgcatcaggactaagttgaattctttgtgcttcagcaactaggtcttgtagtcacggtctggaggataaccaagtgcagtggtaaaagtttgcagtgtttgagtgatcattgggatttcactggctaacacctttgaaagacttactgaactttcatttcttaacctgtggtatctagcattgttgacctttataagttaactctatttaaacaatagatgtatgggttgtattgaaggaattttctgcactagtagtttttcatatttttgttcagaagttctttagtcttagttatctctctccatattttttactcttccctgttcttatctcccaaagttaatcctctttctctttgttctcgaaccttgagagccctccagggttcattcctaattatggagcttctgtaggtattccagttgaaacacatctagagattcaaaggcaacatccacaaaagaactaggatttccaaaataatcttgaacaattaaaaaaaaaatttaagtatcactatctcaaatttcaaattactacaaagctattgtaataaaaatagcatagtgctggcataaaaaccaacattggctagtggaatagaattgaagactcgggcttggtggtgcatgcctttaatcccagcactcaggaggcagaggcaggcagatttctgagtttgaggccagcctggtctgcaaagtgagttccaggacagccagggctatacagagaaatcctgtctcaaaaaaacaaaaaacaaaaaacaaaaaacaaaaaaaaccaaattgaagacccacatataagcctgtattttttagggaagagatgggggcatagggtgagggaagagctataagcctgtatttttacagacacaatttttgacaaagatgccatcagtacattagagaaaagacaacctcttcaacaaatagtgctgctcaaattgtatagctacatgtagaaaagtgaaactagattcttacctcattccatgcaaaaaaaaaactaaactccaaatagacttaggacgtcagtataaaacttagtccccagaacctgatcgagcagagtagggaagttacagacacaggaaaaatctttctgaacagaatacctgatagcgcaggcattaagatcaacaaatagtaactggacctcatgaaatttaagcttcagtacatcaaaggagaccatcattcggggggaggaagcagcctacaaaatgagggttactatctataatatacaaagaacactgaacatcaagaaaacaaataggccaaaataaatacttataaaatataacctctcacactcctatgtttgaaccccggctggtagctgttagggaattgtgggacctttgggagtagagcctagctggaagaagtgtattagtggaaaggtagagttttaattatatgctggcaccacctctagtgccatctatcagagttctgtttcaccaagatgtgaggatgtgaagaatgtcagggacaaacttatttcaccgtaattatatcctcaacttatgagtcagagtaagttattgctttctttaacttgcatcttatatttggttacagcaatgaggaaaatagttaattgataccaagttaacagttaaacaatactaagacatgagggctttgttatagaaaacctggctgtatggttcatatactgcattgtgccatttattttgtgccatgattactattcttggctcttcgacaaatacacagtgagagagagctgagcgacatgaaaaatttatggtttatcagtgaaaggaacaagaacaagtttaaaggtacaaagcatgtgtaataaagaatctaaaacttgcacactttatacttggacagaaagtataccttaggggcaaactccttcctatccaggtatctaggatataaaaatacaaattccttttaaaagagaattcttggaaagatagaacccccaggatacctgctggagaccaaggatgctgggctgtatctcatgctggcagtggacctttgtgctttccctgtgctgctagttatgcagatatgtggaatgttagcttttcaagataatgaatacaagccctagaattttccagcatgttgttgctttgaattcctgatatataaaggccctatatgttagtgcataaagctctggagatatagcctatgttgtagcaaagaccccaagatatttaagaaaccagactttcattgagaacatgatatttgagaccagtgctttcgaaaagacacatattcagaggtatgacatctactttctacccattcaagactgggcccagaatagagaaagtcggtggaatttcggtgtcagaactagtaaaacctggaatgagttctctggcttgatcttctttcatcctgactcatctttaggaaccatcttccttcctttctcagacaattaaagaagaactaacagatctccatatccaggtcctaccaggagtgagctggtctcccaagagagctgacacacctgagagcacaggtgagaccagcacttctgctcaatatcctggcataagagtgacctgcccagagccatagggacacaggaaccaaagaacaactgggaacgggatccttctgatttatatatgtgccccagaactgaccctgtgccacagctctctgtacccagatcccaccaaatagccctgttaaaaaatggggaagactggttagttcatattgttgttccacctattgggttgcagaccccttcagctctttgggtgctttctctagctcctccattggggcccctgtgttccaaccaatagatgactgtgagcatccacttctgtaattgccatgcactggcatagcctcacacgagacagcgatatcagggtcctttcagagaaatcttgctggcatatgcaatagtgtctgggtttggtggctgattatgggatagatccccaggtggggtagtctctggatggtccatcctttcgtcttagctccaaactgtgtctctgtactccttccataggtattttgttccctattctaaggaggaatgaagtatccacacgttggtcttccttcttcttgattttcttgtaggacaacaatgtgaactaatagccccagagctcgtgtctctagctgcatatgtagcagaagatggcctagtcggccatcattgggaagagaggccccttggtcttgcaattttatagccccagtacaggggaacgcaagggccaagaagtgggagtgggtgggtaggggagcagggccgggggagggtacagggaacgttcaggatagcatttgaaatgtaaataaggaaaatatctaattaaaaaaatggggaagagagctaaacagagaactctcaacttaggaaactgagaagcacctaaagaaatgttcaatatccttagtcatgaggaaaatgcaaatcaaaacaaccctgagattccacctcacaccagtcagaatggctaggaccaaaaactcaagtgacagcttatgttgtcaaggatatggaggaagaggaacacacctccattgctggtgggattgcaaactggtacaaccactctggaactcaatctagagattcctcagaaaactggaaatacatttacctgaagacccagctataccattcttgggcatataaccaaaagatgacctaccatgccacaggggcatgtgctccactatgttcatagcagccttatctgtgatagccagaagctggaaacaacccaggtgtcccataacagaaggatggatatagaaaatgtggttcaagctgggtggtggtggcacatgcctttaatcccagcactcgggaggcagaggcaggtggatttctgagttcgaggccagcctggtctacaaagtgagttccaggacagccagggctatacagagaaaccgtgtctcgaaaaattaaaaaaaaaaaaaaaaaaagaaaatgtggttcatttgcacaatggaatactgctcagctattatgaacgaggacatcctgacttttgcaggcaaatggatggaactagaaaatatcttcttgttgaggtaattcagatccaaaatgacatgtatggtatgtactcactaaaaaatggatattagccaaaatgtacagaatagccaggatacaatccacagaactcaaaaaagttaacaagcaaaagggtccaaatgaggatgcctcaatcccacttgggagagagaaaaaagcaatcagaggaggcagagggaggaagggccctgagtgtgagagggaagggagagggggaaagggagaacattatcaggtattgtaattggaaacaggattgaagctctgagggcagcagaatgaatggaaacatgcaacctagggaggtaggaggtggggtgaccctctagaatgtaccagagacctgggaagtgagagactctcagtactcaaagggaggggccttagatgaaatgggcaacactagggagagggaacttgtggagtccacgtccactagaaagacggggcatcaagtagatggatggatttgccatcccatagtcaataactctgacccagattgttcctgtctaaaagaactacagggacaaaaatggagaagagactgcaggaatagaggtccagtaactggtcccaatttggagtatatcttaaggggaggctccaaggcctgtcactattattgatgctattgtgtgcttgaagataggagccactaggctcccatccaagaagcccatcaagcagctgaccgagacagacacaggtacttatacccaaccattgaactgaagttggggacctctgtggttgaattagggagagggtggaagaagctggggacctgtagtaggaccagcattctcaactcgcctggacccccaatatctttcagacactgagccaccaaccaggcagcacacacttgctggtatgaggtgcccaacacatatacaacagaggagaagatgtacccaaacctccaaagacttgtggccctagggagtggggaggtctagtggggtggagtcggggggattggagtgtatagacatcctcttggagacagaagaggaggaataagatgatgaaatgtcggatggtagactattaggggttaaagataattaaataaaataataaaaacagtggttatatggaaatatacttagttttggaaattatgtaagaaataccttagaaacttctttgcagggttttttttttttgatgtttggcagaatatttattagcatattgggggaaatttatatcaataacttgaagatgaaattccatgcaaagtatttttcctcatatttaaaatgcttttttaaaattaatcattccatttatttatatctcaagtgatatcccacttcctggttacccctccacaaaccacccccccatcccacatatgccctcttccctcacccttttctctctataagggtgtacccccacccacctaccctatccttccccgccgctcctgcatcccctatgctcgggcatcaaaccctcacaggaccaaaagccactcctcccattgatgtcagacaaggccatcctctgctacctatgtatgtagagccatggatccctccctgtacactccttggttggtggtctggtccctgggagcactggttggtccaaccagcctatgttattcttcctatgggattgcagtccctctccactcctccagtccttctgccagctctgaggatcccacactgggatcctgagctcagtctgatggttggttccaagcatccacatctacattgttcagttgctagcagaacctcccaagaaatagccacaccaggttcctgttatcaaacacctcttggcaacagcaacagtgtatgggtttggtgtctacagacaaaatggatacccagctgggttggtctccagatggcccttccttcagtctctgctccattttttgtccctgtatttcctttggacaggaacattcctgggttaaaaactttgtgatgggtgggtggccttatcccacaatcaggggacaagcctatttactggaggtgctatctacaggttctatctcccctttactatgcatttctgctaaagtcatccctgttgggtcctgggagcctctcacttccctggtgtcagggacactccagtggctatccccagttcctcatcccccactgctacatatttttattcaattcctgaccctctgtacctctctcctgttccctctagtacctgatactgcccccctctttatttcctcccctcctctcctgtgacattctgttctgccctcagtgcaggactgaagcatccacaccctagtcttcttttctcttaaactccatatagtctgtgggttgtgtcatgggcattgtgagcttttgggctaatatccacttatcattgagcacatatcatgtgtgttcttttgtgtcagagttgcctcactcaggatgatattttctagtgccttccatttgcctgcgaatttcataaattcattgtttttaatagctgagtagtattccattttgtaaatgaaccacattttctgtattcattcctccgttgagggacatctaggttgtttccagcttctggctattataaatatgactgttataaacatagtagaacatgtgtccttgttatatgttggagcatcttttgggtatatgctcagtagtggtatagctgggtctacagctaggactattcccaactttttcaggaacagccagattggattccaaagtggttttacaagttgacagttccaccagcaatggaggatgttactgtttctgctgtcacctgagcattctaactggagtgaggtggaatcttggggttgttttgatttgcatttccctgatggctgagggcattgaacattactttgtttctcaaccattcgagaatccgcagttgagaattctttgtctagctctaccccatttttaaaaatagggttatttggttctctgtcttcaaacttcttgagttctccgtatatattggatattagccctctatcagtagggttggtaatgatcttttccctatctgctggctgacattttgtcctgttgacagtgtcctttgccttacacaagctttgcaattttatgagataccttttatggattgtttttttttttttaagatttatttatttatttatttattatatgtaagtacactgtagctgtcttcagacacaccagaagagggcatcagatctcattatgggtggttgtgagccaccatgtggttgctgggatttgaacttcggaccttcggaagagcaggcgggtgctcttacccactgagccatctcaccagccccttttatggattgttgatcttagagcataagcctctggtgttctgttcaggaaaatttccactgttccctagagtttgaggctcttccccactttctcttgtattagattcattgtatctcgttttatgtggaggtccttgatccacttggacttgagctttgtacaaggatataagaatggattgatttgcatgcttctacaagctgactgccagttgagccagcaccatttgtagaaaatgctgtcttttttccactggatggttctagcttctttgtgaaagatcaagtgaccataggtgtgtgggttcatttctgagtcttcaattctattccattgatctacctgcctttctctgtaacaataccatgtggttttatcactattgctctatagtacagcttgaggtcaggggtggtgatttccccagaagttcttttactgttgagaatagttttcactatcctggattgtttgggtttggtttggtttggtttggtttggtttggttttattacaaatgaatttgagaattgctctttctaactatatgaggaattgggttggaattttgatgggaagtgcattcaatctatagatggcttttggtcagatgcccatttttactacattaatcctgctaatccatggccatgggagatttttccactttctgaggtcttctttgatttctttcttcagggacttaaagttcttgtcatatagatctttcacttgcttggttagagtcacaccaagatactttatattatttgtgagtattcttaaggatattctttccctactttccttctcaggccatttattctttgagtagaggaaggctactgatttgttagagttggtttcatatccagcctctctgctaaagttgtttatcagctgtaggagctctctggtagaatttttgtggtcacttaagtatactatcatatcatctgcaaatagtgatatcttgacttcttccttcccaatttgtatccctttgatcaccttttgttgcctaattgctctggctagaacttcaaataatatattgagtaggtatggagagagtgtgcagccttgctttgtccctggttttaatgggcttgctttagtttctttccatttagtttgatgttggctattggtcttctgtttattgtttttattacatttaggtgtggaccttgaattcccgatctctccaataattttaatgtggagggatactttattttgtcaaagccttgttttagcatctaatgagattgtcatatgttttttcattgaatttgtttatatattggattacactgatggatttctgtgtattgaaccatgcctacattcctgagatgaagcctatttgatcatgatgaatgatcactatgatgtgttcttggatttggactgagagaattttattgaatgttttcacattgatattcataagggaaattggtctgcagttctctttctttgttgggtctttttgtggtttaggtgtcagtgtaactgtggcttcttagaatgaattgggtagtgttccttctgtttccattttgtggaatagtttcagaggtagtggtattaggtcttctttgtagttctgatagaattctgcactaaaaccatctggccctgggctatttttggttgggagacttcaaaagactctttctctttccttagaggttatgggactgtttagatggtttatctgttccggatttaactttgatacctggtatctgtctagatcatccatttcatccagattttccggttttgttgagtataggcttttatagtaggatctgattttttttttaatttcctcagtttatgttgttatctccctttcattcctgattttgttcatttggatactgtctatgtgtcctctggttagtttggctaagggcttatctatcttgttgattttctcaaagaaccagcttctagttttgttgattctttgtatgttctttctacttggttgatttcagccctgagtttgattatttcctcccctctactcctcttgggtgcatttgcttctttttgttctagagctttcaggtgtgctgttaagctgctagtgtatgatctctcctatttctttatggagacactcagggatatgacttttcctcttagcactgctttcattgtgtcccttaagtttgaataggtagtgccttcaattttattaaattctaaaaagtctttaatttctttctttatttcttccccgaccaagttatcattagtagatagttgttcagcttctgtattcagtgtatgtgaactttctgttgtttttgttgttattgaagaccagccttattccatgggtagaatacatgggattaattcaatgttctttgttgcggtaaatctctccaatctagttatgccctagcaatgaaaacacaacacaatttatatgaatacatgttgtgcacctagattgggcagatctgctgctacatcttccacatctatgagaccacttagaacttttgatttctctaggccatgtgcttctgctcttcttttcttcttcctcctctgccttctctctctcaaacctccttcttttctttctttctgcttcaccttctctctctctctgcccaatcatcaggtcacctttattttacaaattaaggtgggaagaaggtctacaagaaatcatctgagtgctgactcattccttgttcataacccctcacagggtaatggaattgacatcaaatataattagccccaggggtatccacaacagttcttgtatctgttgacctttgttttgtgtccgattatatggttcattttggagaaggtaccatgaggtgctgagaaggtctacatttttattttagggtgaaatattctatagatatctgttaatccactttcttcatcagttcttttagtttcattatgtctctgtttaatttctgtttcaatgatctgttcattggtaagaatagggtgttgagctctctactattattgtgtgaggttcaatgtattcttggagcttcagtaacattttttttacaaatgtggatgcccttgcacttggtatatagatgttcagcattgagagttcatcttgttggatttttccctcgatgtgtatgtagtgtccttctccatcttttttgataacttttagttgaaagcatattttattgcatattagaatgactactctagcttgtttcttggagccatttgcttgaaaaaaagtttccctgccttttactttggggtagtgtctgtctttgtcattaagatatgtttcctgtatacagcaaaatgctggatttttgtttacatatccagtctggtaacctatgtctctttattgaggaattgaatccattgatgttgggagatattaggaaccaagaagtgttttctctggtaatgactgagcaagcatatgtgtgtgtgtgtatatatatatatatatacatatacatatgtgtgtgtaatatatactttaatatataaatatatttttcagaaaattaaaatattgtcattttaatgagaatttatataaatctctgtactgaggttagagttctttattaggggacaattgagtttttcagtccatattatgttatgtctctctagttccaaaaattttatctgtattttgtagcttcagcattcaagtcatacatattaaactgaaatttttttctttttcttttcctctctcttcccttccttttttcactcctttttttctttcttggaagaatcttgctatataatttgtgctgctgtaaacattgtggttcccctgattcagcttaagaagtgcatgaattttaggcatatatcaccatgccctgctcattacttcaggtccaatcttggtgatcctgtgtttattgaaaatgtatgtacatgtacttggtttttatttcttccattctaaaacattactgaaactgattggacttgggagttatatttttaatctttgggtactatttgtttatgattttatttactcatttatttttgcatggcatatgtgtgtgttgctatctttggccatgatgttgaataacaaattgaaggcttgaagatcacatgttcaagatcatcctcaaccatacacagagttgaagccagcttgcccaacatgggatccctgtcaaagcatgcatgaagtcatgttggcctgcttcttttctgatgtgctcgcttgcccttcccttactgtgcctcgtattatggactaggacttttgacattatatttcataaaaatgtagaaagaaacaaattcttgatttccttcttagcatttactttagttgtcattttataaagggaaaagtttcctttttgtatttaaatgagttcaatacagatgcaaatacagatttctgagttaaggtagtctttgctttgttcctttaaatacagaaagttggctctcgttggggtctagtgatagttagcatgatttgccaatttgacatgacctagaatcatctgggaagaacctcagtgaaggattatctacatcacattggcctatgagtgtgtctgtggggaactatagttaatggatgtggccactttgaatagcaccattccctagacaggaggtcctaaataggagtccagaaattagagcatggagaaatggcttagtgattaagagtacttgctgtttttactactctatcattcctcaggtactaagtttctctctctctctctttctctctgtcggtgtgtgtctccgtctctctctcatttctctctctctccttcccttctccctagatagtattctgccttctctctacccaccagtgtggtttaatgagagattaaggtgacatatgtatcaaattcttgttccagacctgaagtttttagtttttcttattgacagcacatcttgatttaaaggatgtccattgacgtgttttatcacattagagtactgagtaaaacctcagaattttgtttgatatgttttcagcttgtttgtatgttttgccaataatgttgatatcaaggcttcaagttcttacatcttttaatataatattctttgaacaattagagttgcttaaatatatagggttttttggttaaataatatccaattcagtgtttgagtgcttctttggtactcatagtctttgctcattctttgtatctatatttcttcctgagaggacatgggtctcccagatagagagcaagcctagggacttaaaggaccttccattactaatataggactttcggggccttcactggaaaagtaaagttctgtcattgaatcatatttacttgtaatggctatggattctgctgactggcaaggtcctagctgtcaattgttacagatggatctctcttccagggtcctgggcaactgtaatgccttgccctggtctgttgttacccactcgttgttaggaatgctgtaatttactgcattatcttaatttaactacaacattctttgtttaccaaaaaatataagaacccaagttataaatgaactaataaatttctttttctttttcaggcaaaaacttcttatcccaaatggaagttgctccattattctgaatacttatttttgtcagaaagctattgcaaaagaaacagtgcgcgaagacctatacagtccggacatatctctttcaaggagaaatataactttggcccagacatttagaattaaggacataacagacaattcatccatcaatcaggtaaattctcattggcttatgatttttacacttgtagtagtacttgtacctgtatttgaaaggacctgtgaataaatgaatatatctatcttctgtcctcaactatatatgttagagcatgttatcatcatttatgccaaaagatatgaaagctcaagtagcatttagtcatggtctcattacagttttctatcctcccattatgtagtcttaatctttagttcaatttattaaaacataaaagtactttcagtcccatggggctatggttaggatagtcaggactcagaaagtatttttctatgttcattctgaaaataagagttttaagcctttagtaaactttatgttttctataggaaacattatgtgtgtgtgtgtattccttgggataaagctttataaattatgtttgaggttatatgatagaagttgatttcatagaatttgggtggggggctctgagctattccaaaatgaatttggaatttcacagtaattcgctggtactgggcagggtatacgtccatgaagactctccgctttgggagtctggttccagtacactggccacaaattctctggattactagaatcatcacagcacagactactgagacgaaaagctagaagtagggaaaataaagtatgtaaacctttaccctgctttcaatcatataataaatatctttctttgactatcaaaagaagtatctggaagggatagtttgagaagggtgccaaagctgccctgtgacctttacatacatgccatgtgatatgcacaagcacaaacatgggagtgagggtattaaatttaaaactacaaaattaaatttgtagaagcatacttttaaacagtttgtgctaacgtgatagtactgacatatgatttgttagataacagttaccatgtagcatagtggtgaaaaactacaggttttgagagggcttgagaggaaactcagcattcagactgtacttgctgctgttccaaaggacccaagttcacttcccagaacctacataggtgtctgataactgagtataattccaaatgcaaggcatctggtgatctcttctgtcctccaaatgtgcctgcacatatgtaccactgacactaaagcaaaataaaatagggtttggagctatttgtattgtgtcccatgccacctctgcagctttattctagttcacattaggtaatttctctgtgcttccattttatctatgagaataattagagttgttgtaaagataaatattatttaaaaaacagagtcttgaagataataaaatgaaacagaagtatcgttggtttatgatcattgacgttatatagttttggggagaatacatgagtatgcaaagtatataaattagcagataacacattcaaacacctaataaaatgactcattttaattaaactgtattcattctttttggacaaaccaaaaagggaagctatcctcatgaggtcattaatagtaggacactgttcgtaggagaaattctgctctgttgtcttcagtaggtagatgccagtgtagcatgattgtctgttctttagtgcactgctagtgctttggcagtcacctaatgatgtcacttttttggacagcacaacactatgcatagaacttaaattattccttttgcatgtcttggacagactacatatgatagcctggccacccctggcacaggctggacccacggacatgagaaggcagagcaacatcttatagttgctgctcccctgaggaattctcttctggacattgtggaaagccaaagagctggcctatggtctggagtcagggtccaagtagtagtgcagagggtgtactctcttctcagcagagatggtgccaggagccagcaagggcacacagtgggacatgcagatgcctctggagcatggtgagtggcaaacttaggcatgggaaaagggaagcacaacagagttcccaagaaaggaagctctgctcagaggaatttctaggtgacatttactgtatgagactgttttgtatatctttttcttacattagaattcggaacatgtgtgtattagttaaagttctctagaggaacagagctgactgaatcaatatgggatttttgtggtctagctagccaaacaatggctgtctgcctaccaatagaatgtccaagaatccagtagtccacaggactgaatgtctcatctgatcttcagtccatgctagaatccttaagtgggctgtaatgtcgctgatgaaatgagcttgctagcaagcctgaggcaagcaggcaaagagcaaagcttcctccgtggtctttatatacgcgggggcagcggcgggtgggcccagatcagatgtatatcatactctcgcacaagttccaagttaaagttggaccttcgatttctaaattatttcaataataaaaatcactcataggtttgctcaggtgcttgggttttggttaattccagatgtagtcaggttgacaaccaagaagagccatcacaatgtatagtacatataacaaacaattttgtctcttttatataagaagctttactaaaaatgttcctgggctgatcagtagtatacatggtatatctaccacactgccatcaggacatgcactacctgaaattgttgcatttactggcttatgtaatagaaagtaatacaaatttaagaagtattttgtagggttatggaaaagaatgacatgtgttactatacctaaaataatcattacagtatcaattctttaaaaattaagtgacagtttgacagtctgtgactctaagagactgctatttgaaatggtatatacatttttgtcttattgacagtgtcctttgccttacagaagctttgcaattttatgagatcccatttgtccattcttgatcttacagcacaagccattggtgttctgttcaggaacttttcccctgtgcccatatcttcgaggttcttcctgactttcttctctgtagattttagtgtatcttgttttatgtagaggtccttgatccacttcaacttaagctttgtacaaggagataagatgggttgatttgcatccttctacatgctaaccagttaaaccagcaccatttgttgaaaatgctgtcttttttccactggatggttttagctcctttgtcaaagatcaagtgaccataagtgtatgggttcatttctgggtcttcaattctcttccattgatcttcctgcctgtctctgtaccagtaccataaaatttttataactattgctctgtactacagcttgaggtcagggatggtgattccactcagaagttcttttattgtttaggaatagttttcactatcctgggtttttttgttattccaaatgaatttgcaaattgctctttctaactctgaaaaattgagttggaattttgatggggattgcattgaatctgtagattgcttttggcaagatggccatttttaatatattaattctgccgatccatgagcatgaaagatcttttcatattctgagatcttcttcaacttctttcttcagagacttgaagttcttgtcatatagacctttcacttgcttggttagagtcacaacaaagtatgtaatattatttgtggctattatgaagggtgttatttccctaatttctttctcagcctgtttgtcctttgagtagagaaaggccactgatttgtttgagttaattttatatccatccactttgctaaagttgtttatcagatttaggagttctgtggtagaatttttcgggtcatttaagtatatgatcatatcatctgtaaatagtgatattttgaccaacagattgggaaaagatctttaccaatcctacattcaatagagggctaatatccaatatattcaaagaactcaagaagttagactccagagaaccaaataaccctatttttaaaaaggggtaaagaactaaacaaagaattgtcaactgagaaatattgaatggccaagaagcacctaaagaaatgtacatcatccttagtcatcagggaaatgcactttttgacatccacaatagtgtctgggtttggtaactgtatatgggatgaatccccaagtgggacagtctctgggtggcctttcctttagtctctgctctacactttgtctccatatttgcttctgtgattattttgttctccatctaagaaggaaagaagtatccacactttggtcttccttctttttaagcttcatggggtctgtgaattgtatcctggttatttggagcttatgggttagtatccacttatcagtgagggcataccatgtgttttgttttgcaattgggttacctcactcaggataacattttctagttctaaccatttgtctaagaacttcatgaattcatcgtttttaatagctgagtagtattcctttgtgtaaatgtaccacatttgctttattcattcctatgttgaagaacatctggggttctttccagctcctggctattataaataaggttgctatgaacatagtggagcatgtgtccttgttacatgttggaacatcttctgggtatatgcccaggagtgttatagctgggtcctcaggtatatgtactatgtccagttttctgaggaaccgccaaactgatttccagagtggttgtaccagcttgcagtcccaccagcaatggaggagtgttcgtcttcctccacatcctcaccagcatctgctgtcacctgagtttttgatcttagccattctgagtcctgtgaggtggaatctcagggttttttttttgatttgcatttccctgatgactaaggacgttaaactatctttaaagctaagggtttcacataggcaataggcagatggattttgtttcttatttcattcagctagtctgttccttttaattgaataactgaggctattaatatttagagtgtttgttgaaaggtgtatgtatattgtggtcattttgatactttttgctggtttgtgttgtttattgtggtttggtttgttttctttctacatcctcttggctttgcttcaatctagagtattgctttaagtattcttcatagtatttttctgttgtatgtgatttttttaaagattactgggatgatagaaagttctctctttcatctatagcagacagttttgctgggtacagaagtcttaagttggcagtaatcatagtcttctagaacttataactccaggtacttcagactttcagcattttagttgagaaattacgttattctgatgacctttcctttttatatagtttgtgttttttttcttgcggctttcaatttttttttcttctgggtaattgcgatatgtattaaagtgtttcttgtttggtcttatctgggtttctgtgtgcttcttgtatctgtatgagtatatctttccttagtttggggaagttttcctatataatcttgttgaagatctagtttctgccattgacctgagattctttttccatctatgcttataattccaatatttgatcttcttattgtgtccaacatttcttgtatgttcctatcctgtgccttttaatttttttattttctttgtttattttgtctagaccctctattacatctttgagtcctgatagtctatcttctgcctgacttgttagatgtgtaactgcagttttgatattttcaattccattttcatttcagctttgtgttcccttcagtatgtatacctctttattaaattcagttgtccaaccctcaattctcttcattattatattcagctgtttatttgtaaatttcttgaataccattaagcatttattgttatcctcttgaagtttggtgaagtattcgtttgtgtcttcttaaattgactgcattctttcataaggtttattattgttcttttaaattttgtatcctggggtttatctagggagttctcattacacaatacttctatgagactagtgggtttaatgggggaaaagttttttagaccactaatgttgtttttgattttgcttgtgtgtctgatgtgataatctggccttcattattagattgtagtagtagcagtagtgcaagagatgggcaacctgagctaggctgggtaaagctgaattaattggagtatggaaacatgactcctaaagcacaggtctaaaactagacaagacaaaaggattcacacaatgaagagagccatggccacaggtctgaactcagcatgcatgcttgtagatggccgtgagctaggagaagtggagaaatctgcctttgttttcttgaagatagcaattctgtccaaggttagatggaggcttaaaacaaattttaattgacaatttcctggaaacttatgaaattgaacactttttaaattattagcaacttttgagaactctgttccttagctctatggcatgcctactctataagtttttgcctgaatcctacgcttcttggaatctgttttttttttcttttttttcccccattaattaatttatttagtccctttacatccagcttctctttcacctctgagaagggggaggtaccacatggataccaacccatctagagcacctcctctcccactgaggctagacaaggcagtcctgttaagggagcagaatccataagcaggcaatatagtcagggtaagcccccactccagttgttggggtacctgcatgaagcccatgctacacatctgctacataagtgcaggaagcaggtgggggcctaggtccagctcagctctttggttaatggttcagtctctggtagatcccaagagcaggtgagtggactctgttggccatcttttggagtacctatcccctccgggttcctcagtccttctcccaaatcttccacaagatttcacaagctccatctaatgtttagctgtggatctctgcatttgtttccatcatctgctggctggaggctctcagctcaggtagtgtgggtgtcctggataatatcgacttataagtgagtatacaccatgaatgtccttttgggtctgggttacctcatgcaggatgatgttttctcatcccatcagtttgcctgcaaattccatgatacccttgtttttaaataactaagtagtattccattgtgtaaatgtaccacattttctttagatattcttcagttgagggacatctgggttgctccagttcctggttattacaagtaagggtgctatgaacagctgtctacaaacaactatgaataacttgaaaactaatgctggaaagacagtcctgaggagagcatatagaacaatttgacttaaggtcaggaatttaccacttccaatggaaaatccacttacctgctcttcttcctgcctgtgaaagagaggggctattttagggttttattgctatgaagatataccatgaccatgacaactcttataaaggaaaacatttaattggaggtggcttatagttcagaggttaatccattatagtcatggcaagaagcatggtaacatgcaggaagacatgatgctggagaaggagctgagagttctgcaggaagtgaactgagacacactttctccaacaaggctccacctcctaatagtgccattccctatgggcctatgagaggcattattattgaaatgaccacataggccttcagatgactagttaaagaataaaccagaataaggcaaaggctacttacttctaaccactaactgtgtctctccatcagtattatggcctctcagtgccctagatgggtataaatcggaaaagaagaccccatggtagaagattaaaccagaggatggaagttagggtatgagtcctgggtggagggatgactcaacaagtcagtgtctgccctgcaagttaatggctcaggcattaagcatgatcccctcaatgggtacagaggaaaaaaccttgtgcagctcactgaataacaccagctattcaaaatgccagtgcacctccctagattttaagttgatatttcaaacatattaaaaggtaagattaactctttgatatggaataattcatatactctcttcattttaatcttgaccttgttcaatagatgtatttagtataagataaaatagaaaaaagttagaagataagtcaacaagaaattgttttccttaagaatttagagtcaggtatggtggcatacttctcaatcctagttcttgagaacatcaacgggtcaaggccagcctgggctacatagctagtgccgatctcaaagcaacaaaaaaacataaaaagaatttaaaatatgagctatggcattgcgaaagctcagacttaatgattctgtaggtaagctcaagaaatgactttcccatgttatgacacatgtgtgtactcctgtaccctggcagctgaagcaggatgatcaaaattttgaggtcaacctgtgctgcctgtgctctgtgtcaaaaaaatctaactgtgctgcagagatgacacagaggttaagagtatttgctggccgggtgtggtagtgcacgcgtttaatcccagcactcgggaggcagaggcaggcagatttctgagttcgaggccagcctggtttacaaagtgagttccaggacagccagggctatacagagaaaccctgtctcggaaaaaacaaacaaacaaacaaacaaacaaaaaaacaagagtatttgctgcttttccaagggacccagtttcaatttccattaccatggcttctcacaatggtctataactccagttccatggtagctgacgccctcatttggcctatatgggcaccatgtgcatacacatgatgatcagacatagattcaggcaaactacccatacacttacttgattatttttttaaattagagaacctgggagctagggagctagctcagctggtaaagtgtacaagcattagaacctgagattattccccagcacccactcaaaactagcatgatgaggtgctcctgtcttatcaacactggggggagatggagacaaaaagaaccccgaggttccatagtcagccagtctagcctgctagcaaagccccatgccccagctatagactccatcttaaaatacaaggcgagtcctgtagaatgagaatggagagtaactgcttacctatatacacgtgcatttcatatgtgtttgtgtgtacacaaacatacacatataaggaagaatgagcgttggggtacatgtctataacctcaacattcagaaggcagagactgaaagaacagtcgttcaagatcatcctctgctgtacagccagcccaggatacatgagactttctccaaagaaagaagagaggtgaggggaagggcggggggacaaattactgagggtcttctccccttgctttagaaattgttctgtctcttgtttgttgcagaacaagatcttccaggaaaaaaaaaaaggtactcatattagcagactatgttaaactctgcccgaccactggtccttggcacattccttgcacatactgttcagtaaacaacttaagggaaccagatccagccagatcattcactgagagcctttggaagggcctgtcttagtacagccttgacgtggaagaagttgagaagttagcatttgtgttttcattagttctttttagaacaatgaaccagctgtagctggttaatagaagccaggcctgcctgttagtgtgcaggtctcttacgcatgacaaagggcttctgacggaaacaggttttattactcatgaagccactcatgctgtttacataaagctacttgtgcagtcatgtgatgtgattgagaatgtccgtgttaatgctccctggatgcagtcccactccatactgcaaaaacaaacaaaagactccaaaatatagatcacttcctattaaactagtcatccttggatggtgcattcaagccagccaaatcctagctaccaaggattttttttttcttttcgatgttttaaattagatggagaaagtcattattgtttcaaacacaactaggtataatatttgggggatagagaataatttaaccaactatttctagttaagttaaacagaatcattcatattactgggtaaactgcctgaaggcaaatgttaactttttatatgaatcattaatttaggataaattaatacctttcattagaatgtatttttctttctaacaaagtgaaaaacctcttaaataaggtttattaggggtgtgtgtgtgtgtgtgtgtgagagagagagagagagagagagagagagacttgcttagagattttagtcaattttcttaaatagcctgctctgtgaatcagtctcattattcacaaagagagcttaggcctttgaaaaatgcttaatgagtaatttgtgaaaatagaaggactggcattctttctatgtgtaaagagaatcagccagttcagctgtttaaggacattttcacttttctgacattttcttcccattcatgaacagtataaatgatttagtaattcatatgttagggtaaagtgagtcccctgcaattactatcaccatcccacagaagaagttcatagttaatgaggtaaagatgaactggctaaactactcaagatcttgatttttttttttcaaatataacatgggcaaacacattggcaggccatgccagtttctctattcccaacaaccatctaaagcaggcagagaatacataaatagatgatagtgctgtgggccagtagatgttcacctacaaaaatcgtgaagtgagcatttggtccacagcttctgatctgcttaggtagggagatgtcttgatgtctagatttttctttgcgctgccaataaggacagggaattttcaacctctgttgtaggttcagctctaacctcacacattgtacatcaaaacagtgatggaaggtgtaagtatgggctttgttttgtttttaactaccttcaaaaaataaaattgcagtggtacattatatattaatatgtaataagcatatgttagtaaatataatatattaattaattcatatattaattgtctcaactcagttttgaaccaagataaaaatctgaaagttttattaaagaattatgtagtgattttaccttttttttttttttttttggccagtgtcaggtgagctctgttccttttgtagaccgaccatcattatgtctggtttgttctcctagccattgttcccctttgttttccctccccctgtctgctgccctttgctttcatggccagtgtatgcatcaccttgtatttctcatgggtacttcctctcgcttctgggagcaaagtgggagaaatagaagcaccacaaaagaaaaaagcaagtagcataaaaataaaagtataaaatgaaagcaagaattaatgtaaattcaaaaaaaagcagtagaggttagtgggaaagaatattcaaatagtgtattcagtggcctcaattctaatgccagcttggatcttggctcgagcgtgtgacattgagttgtttattgcttgcagcctcaggtttctcagcattacagagagagatggttataatcccacacactattttgtaatatagtaaatgtgtttcatactccagtgacttcattcttctataaatattattcttgaatgtccactggatagtagcttttcttagatatccatgcattcatcttggctgccatactcagaatatgtgctagatgtgggcaagaagaaatgaacttcttattccgcaaataacacacagtctgcagccctaccttctgagcatgcctgtgtggctgatctcattttcctgttccttgttctcgtgatctgtaaatcagatctgcttcctgattcagaaaagtgaaagtcctgcattactggaaagatagagactgttagaacaggaaggtagccagcagccttggcactgcaagagaaggggttcagagggaggagccagtagtgaagaagctgaagtacacccacatttgtgatcatttcctgatgtgaaagtgttctgtcctgtcctggatgtgctcaaagagctgatgctgaatctgggactgtcccaaagctttttaattgtggcttgaataaggctgtggattctctgtgcccttaggttttgagaaagatttctattagggaagtgagaagcttttctttagagtccttgggattcttacctcctaattgttgcatatttaatacattaaagatattttttaagccatgtgggtatcacttataatgaaattcacatttaaatttcatgacaaactgtatgtccttctaagcagaccagcacctagaaatggctaacatttccctacaatgatcttaggaagctgaaggacctgccattttagattagttaggtgatgagaaccatgagcatttataacattattttagaattggccctgtgagttttaagacacagaactgaatgtactgccagatatttttgcaggagtcacagatgtgaaagaaaagtctgtacacacatcccccgtcccagcacccaaatggaacatatgagtgaggccttctggatttggctatttttagagaaatggaggtgaggccagaaaatactttcttgcaacatttttttttattatataacatgaaaaatatttgttataatagtgatctatcctatattgtgatttaccctactgattcaattaacctcttccaaacaattagtgaagttttgcttcctaatatttgagagctaacacatggttctcagacaggggctagatctggcagagctcgaaataaagcagcattattcaacatttcattttgtgttgtttgtgttcgtggctcaggttgtgcatggaataatgtgaccacaggactgtcagtctgatccttccgtattaattatttgggaggaggcatgtttgtgctgtggtgcctgtgtggagtcagaggataacttataggagttgcttatcttgttccaccctgtggagtccaaggattagcctcagattatcagacctaaatattttcaagattttcaataaatttattctgagtcccattctcatgtgagtagtttactttaggttgaagtcatgaaaccttttgttcatagaacatcagtgaatgttttcttctgttcaacatttttgactattcaagagggagggaatttggctactagaatatctagatgctgggggtatggtctttagatcccttctcatttatttgtttgtttttgcaagtcctgaaataaagtaaaataagtactcaaactttccgtacagtaccaagccttcagggcatctacacagtagttctagaaggggtatatttgagatgcacactatccaggattcccttgaaggaatcctgggattcccatcccaggctgagatggaacatgaagccaggtttgtctgtgaacattaaagctgacaaatgcaagagacaattagccttaatgaaagctgtacccaagttatttcacattcagagtataagaagttattttgggactggagaatatagctctctagtgtagcacttgattagcatacatgaggctacagattcaaatcccaaggtcatactcacaaaaaaggtattctcaactgttcactctggtgagaaccaacattgctatagatgatttttaactagaactaatttcatttgcttatgagcaatagagtatctcagcttttacctggcaagaactctcctgtcaaaacaggtatctataaacagcaattaagtaaattaacattgcttttagcatgttatttcttgatgagtgaaaaacatttgaaacaaaagtcagtcatcttagactctgatgagatgagaaagaaagtaaatagtgttctgttgttcctcttccttccttctgcaagccgggcaactaggaaagagcccagtgttcttcctcatgaaggagtaggccttgaaaaagagcagaatctcaggctccagaccttcttccttgccgtagatatgggtgtgtgtctgtgtctgtctgtctgcatatgggtatgctcattgtgcccattgaggttggaagacagcatcagatttcctggagtggtttcaggcatttgttagctgcttagaggagtagtattctggcctctgaaagagcatcacaccctcctaaaccactggtccttcggcacaacctttttcctatctttttaagactaaggtggaaatgacaaaagaagggaaagataaaaagatgaaagcatacatcagtcagacgtaatacatgagaagtaaagaggagggtcttttctggtcacgtgacccatttaaacaaagtctagaactgcagccactacactgagtctgttgtatctcagactgtgtatctgtgtccttgtccctaagctcaagtcactgccatggttcctgaggggtatggactgtaaaagtcctttctcacctagcacaccctggtcgaaaggtcagtatcacagatgtgtaacttctctatctaatcaaaattgtgatgagaatatactaactaaaaagatgtttattcttgggttgtattgggacatcatgtttgtggtttaaaaaaaaagtagtgattttgtttaccaacatagagcctagagatttttattagcaaatgctataattgtgttcagtaaagtttttaatgccattggaatgtgtttgagaagaggttaactttttgttttttgtttaattttttttattgaatttaacttatcataagtgtatgagagaggcagacaaagacagagaatagctgggcacatgaatggaggccagtagacaaataccaggacactattctctctttctcttatgggttctgggaccaaactcaagttttgaggtttgtgtggcaagcacttttacttctgagccatctcactagcctagggttctctttttacttgtactctctgtaggtagatatacattctatgcattctgtcacacatgtattctcattatgtatgccaccacagtgaaataccaaacagatgaaaacttccatctccagctattaatatgttctttatttctctagttttattatttcaaggatgttatatagatgttgcatggatgcatccttaaccacactgtggctgagtatagccatagtttatttacatgctgaaggacatttggaacgactccagtttgtgggttctagagcaggggtaaactacagctagcaaccatacaaccaagactcctttacaatatatctggttctacatttggataagagagaatataaaatatgtcttgagcatggaatattggcaataacaaaaggaaaggttggtggttaacccaccttttctgaataagtgtagttaccacctctcatcaaagtccccgccttacaacagagacattgcagaaaaccacaactagttacaatgtagagatcaacaaaccatagagaacccaactccaacttgtacatcttcatcaccatccccacatctatggctcactgaacatcaaggaagagatggcagggagattataagcatcagaatactagagagtctgatatgcaacagtgcctcctagaaatggctatataaacaaaactggaacaatttcaatgtcaatagacatttaacatacaagggaagaaatctgtgggtcaaatgggtcaaaatgatatgttaagatagttttaaccttaggtttggtcttcccattgtgtcctggatttcctggatgtttcaggttaggagctttttgcatttcgtatttcctttgagtgttgtgtcaatgttttctatggtatcttctgcacctgagattctctcttctatctcttgtattctgttggtgatgcttgcatctatggctcctgacttctttgttttgttttgttctgtttttgtttttggctcctgacttctttttttgtttgtttttgtttttgttttgttttgtttttttgagacagggttttctctgtgtagccttggctgtcctggaactcactttgtagaccaggctggcctcgaactcagaaatccgcctgcctctgcctcccctagtgctgggtttaaaggcgtgcaccacctcgcccggattggctcctgacttctttcctaggatttttatccctagagttgtctccctttgggttttcttcattgtttctacttccatttttagatcctggatgtttttgttcaattttttcacctatttggatgtgttttcttgtaattctttaagggatttttgtgtttcttctttaagggcttctatctgtttacctgtgttctcccctatttctttaagggagttatgtttgtccttcctatagtcctccatcatcatcatgagtagtgacttaagatcttaaaatcttgcttttctggtatgatggtgtatccaggatttgctatggtgagagttgggttctgatgattccaagtaaccttggtttctgttacttctgttcttatacttgcctacctgcccttgatatatctgattggagcctgttcttcctgtaatccctgttgagtcagaactcctcagagtccagctttctctgggatcctgtgattctgggatcctgagatcctgagattctgggtgtgtcagagttcttggcagtcaagcttcctctgagaccctgagatcctggtgtgaccaagctcctgggaccctgggatccctaagatcctgggcatgttagagcacctggaagtggtacctcctctggggaccctggggctgtctgctgagttcaaaaccaagataaaccagcactgccaactggaaggaactggagccactggacaggcagggctcctgtgtccctgctcctgctggctccaggaactcctggttgtgttgaaacagatgttatgttccactcaccagtgatcctaagatcctggacgtgctagggctccgggggttgggggacaggggatggagagtcatctggggaccatgggactgtccacagagttcgcgacgccatccaaaaggaacctgagccacttgttgagcagggttcatggcctagtcggacattaatggaagaagatgccctttgtcctatgaaggctgtacgccccagtgtggggaaatgccagggacagaaagctggagtgggtgggttggtgagcaggaggaatggggaggggatagggagagggtgtttttcggaggggaaatgagaaaaggggataacatttgaaatacaaataaaatacccaattaaggaaaaaaaaaagaattgttgttactctaaaaaaaaaaaaaaagataattctaaaacattatggtcatttgatgaccaaatatgatatctactctaaatatagtatgatacttaccttccagtgatatggtagataatgtccaattgcatgtgtaaagttcttgcacactcagtggacccctgtaactcagccacaagaaaagtaatagtgagattataatgtgcctgagaaaaatgtcaaagtcatgaaagtgaaagaaaggtaatgatgaggagctctaacatttgcagaggagaccgacttacagacaagatgccatgtgaagctctaaaggccatgcatgaacagcaaggtgacacaaatggggtcagtgcccacaaagactgtgtgggaagttctcatttgtatggaacagacataaacattcttggagatgcagagacttcagaaggaagttctctggtgtaatttaggggagaaatttgaagatgcttcattattttctataatttttacaaaagtgattgacagatgtaaataaagcctgtgagctctaggaagttggcaggaaggaaggtcagtgaaagaactactagaggaggagacttggctaatctgctcatggaaagaacaaaatgatatagggtactcgatagtgaagcagatctgaaggtgtctagtgtgagcatgagtaataccagcgggaatacaccagtgggaaggaagttgggaggcatgttatacaggcttggcaggcaccttacaggttgaagtaagcagcctgaagcaaattcacacctggacccaacctttctagaaagaagagagttgtcatctaacggtggctacttagctacctgctgtctctggtacaggaaactgcatatggtttaatattgaaaataatttatttaaagtacattaaaacaatttaacgggtttcagtaattttgttcctagaacttgtataataacttataaggttttcattaatattgggtgcagggcttgtatgtatgcattttactaaagctgttttcatttggtagagtcagagaggataaagtatatatgtgtacttcataaatgagatgatttataaaccattacattagacaagtcttgctggtgtacttctgtttgtttgtttttacaattttattaggttcttaacctctactgcctttccaaccgttgttgaaccctaatcccttccaaacccccaatagtaggtagaggacaaagctgagaggggaaagggtgaatagatctatttcagccaacaaaatagactacttcctattgattagagatattgaatttcttggggcaagtccacccttcatcatcaggatatcttcacttttctttttctcatctctttgctcatgaacacttgactaactgaaacaacagcaagcagggtcttgttggagctccagagagaccccagaattaaactgtctcaccagtatttgggagccatcttagatctaatgtcatataatacagatcaggactctttgtagagtcagaacctgtgatgcctcgctctccatcccactttttccttcacaagttgacctctttatccctatgccccaaaatgaagaaccttttggtttctgaagcaggagagacagaagtctgatcttcagcagacaggactgtttattaacacacacaacttgggacaacctctctcaggctacaaactgaaggaagtgatgactgtgattcttcatcaaggaggtgtgaggggcttggaaatgaggaaactgttgtagtctacaactgcctcacctacaatctgtctttacagaaattgtgtgcctgagtcaagacatactatcacttctgggataactggtgacagatcatctctaatatcataggagttgcttaatgttgtgacagtggtagtagatatggaatcctacccggtatcaaaactatatgaactatacatttagcaaggaaagtttattatttgttcctgtccagtggtactggaaagttcataccaagcatggtggcacatgcctgtaatgtcaatacttaggaaactgtaacaatgagcttcaagtttgaggcaagccagggatacatagggaaatcctattttagtatggagagagagagagagagagagagagagagagagagagagctcctgtcacattttagcaggaaaaaatatggtttttaaatgaataagaaacatttctgtagagccgggcgtggtggcacacacctttaatcccagcacttgggaggcagaggcaggcggatttctgagttcgaggccagcctggtctacaaagtgagttccagcagccagggctacacagagaaaccctgtcttgaaaaaaaaaagaaaaaattctgtatagcaaaaaacctgctgttaacatctcttcatgttaaaaagataaacagcaggattaagtgtttactttgagctcccatgcctggctgtttttcgagaaaagggaacgcagtgtcctgtgtctagttcccagctgcagggaagcagccctcctcctgtcttctggggagctcctctctcatctgggtcaagcctctcctggctcttcctgctcctgggccgcccttctctgtctcttgctttttatgtttatactccgtactccagttccttctcccttgttcttgagttgatgcttagtaaaaggttctgaagtagagaataagattttgtagatcctcagagactgcagcctccgacagtgacctagaatagaacagccagcctgtcttgattccgggaattcttagtggactgctaagaactgccccgatctcagcgtaaacacccacatggtcacttaatcttccttcttggcaaatgtgcatgtgctgacacacacgtccgcagtttcccttgctccctctctgtggagcagtgaaattgtaccactgaatgaaagaaagagaagttagtttaaaaggaagagggagagtttgaaattctcaaagggattagcctttaaatacccctctacaaatctaacttttttcctttgtcattcatttgatagtttttgttttttattatatgtaatttttaaagcgttttaaagctgcaatgaagctgataaaggcaaaaaataaaaagttttcagggtctggatatagctttgactgaatgcttgatttctacacacgaggccctgagttcaatcaccagtgtatgtaaatgtgtgcacacatatacacatacacaggagggaaaacatttttcaaaggcaaacattaactatataatagacctttatatgtctagcatgttagacctcttatgtgtgttcttttgtttctgaaaaggatgataagggttcataaatgtcacctgcgttctctttgttgttgtgtttctttttgattcggtgtctcactgtgtatcacagagtaactttggacttgctgtatatatcccacagtggcttcaaatcatgatctctgccttgggcctgggattagaggctgatgccattgtgtctaccactgtggctgtctcctgattgcggaggttcttcctgggtggaaccgagtgactagctaggacagggccaatgtaggtaatgcatttccaagttatttttgctttacccttagcaaaacattacattacaaataaaaccacagtagctaaggggtgagattgctgccataaaacccgtcatcacaggttggttcaggcagaagctttacgctgctatcatctctctccctctttgctttcacataaagattacccttctatgaagacaaataaatgaatatcactagcaattcagattgtctagatggatgacagaaaataagatttttgatttgggaaaaagtataagaactcaggtggtggtaagcaagttaaagttacctggattgtgtgggagccagtggagttgtgttcatcagccacagagcacaaagttaagtctctttcccaggccttgcaggcttttctgttccacatgataacagccagagacatgggaacctgtttggataagggtgtttgttttatgcctcagtactataagagtagaatttacttattagaatgttattccaagcacagaatggtgagctgtctgataaaataagtccagttctggagctcttattctaaccatgaacatcttactacctccctgtgaaacagttttctgttggtaatctaaattaatcattactaaagatagtatccatctctccttcatgacaagtgctcacaaacagttctgagagctcccgtgatgtgagtcggtgtgaatatttagcttaccagtggcagggcagctaatggacaagcctcagtccactgcccaaaatggagggttattatgagcactacatcacactaactcagagcacaactctaaagtgtcaaatcttctgacacacacctctcatagcttgcctctcttatttcccattatctcccaaccatctaaagatagtgctattcttgcttgttgtcttccaggacacaaccacacaatataccaagtctcttctgggaattcaggtgttggtatctgagcttcagcctactctaaaaacatatgaatatatagacatcctggaactaaaatcattgaaactccttgtcttggaagggaatccacacccacagagtaccctggtcacatctttgctcgtgttccctctaccaccaaattagtctagggtttgttttgcttttaagacagattctcgatagtagtctttcttccttagcatccagagtggcagtcataaaccattgtgcctgcattgagcagtttgaatctccaggctcataatggcaaactatttggtcctcttggctctatggggagagatctgacacaagcagtcaggcagacatatactgtgggagtgcctagtgtaacacacagtctctctctgtcgcctatggatcaagatgtagaactctcagctctttctacagtactatgtctgcctggacactgccatgcctcccactatgatgatggtagactaaacctcttttaaaaactgtaaaattaaatgttttcctttataagagttgccttggtcatggtgtctcttcacagcaatgaaagccataaataagaaatgagcataaaagaatatttgtagtagtcattttattgtttggggttttttttgttgttttgtttttacaccagtaatatttggtttatcttaggtgtctgtgttatttcagctctgattcttagccactcatagagtctcaggtatgggttttatctcatggagtgtgccttaagtcaaatcagacattggctggttactcctgcaagtctgtgccaccattgccctagtgtgttttacagcaggacagattgaagatcaaaggttttgtggttgggttagtgtttacttttcacttttttgttttgtttttgtttttttgtttgtttgtttgtttttcaaaacagggtttctctatatagccctggctgtcctggaactcactttgtagaccaggctggcctcgaactcagaaatccacctgcctctgcctctgcctcccaagtgctgggattaaaggcgtacaccaccaccacctggcttatttctaactttttgagacacctccacactgatttccatagtgactaccagtttgcactcccatagacagtgaataaatgttcccttttccctacatccatgctagtttctgtcttcttaatatctttctttctttctttatttaatcctggcaattctaccaagggttgaagatgaaattataaagtgtttttcatttgcatttccctggtcttgtattttaaaacattttttaaaatgtttctcagtcgtgtattatatcttttgaaatatggttctatatatactttctgttgtgataaaatgctataaccaaaaaacagcttaggagtaaaaagacttattttggcttagagttccaaagggatagaaaccatcacagtgtcagagccatggcaacctgtagggaagtaagatggcaaagtcaggaaactggccatgtattcatctacgaacagaaagtagaatgagactatcccttctcaacgttagccactaatgaccgcttcctctaacaaggttctgtctcggaaagtttccatcaagtccacaatggccccaacatgggaatcaggtgtttaaatatatgtatgggagacattatcccattcttattcaagcctccatagttgtctactggaactaaatgatgaggtttttggtttttttttttttttttttttttttggtgaagacaatacaatacagaaaaagcgagctagggctgagccagacgcctcctctgctgagtagctttcccagcttgggggatggggataatggaggagaagagtcgtcaatggtctttcccactggtggacctctgatgctatagtaccaacctgctggggatatgtgccaatactggaacaatagtatcaccggtacaatagtggtatgaccattcgggattatagagtattttcccttggatttgaggtccattcttgaagagaaaattcatgcctaatatgctgtacctagtattttataaagcctcactgccaaggagatcagacttagggatgtggaagctgctgctttaccaaatggccatgatgtgaaactgtctctaaatacttgttggttttttgtttttgttttatttatttattttattttttttgagacagggtttctctgtgtagccctggctgtcctggaactgactctgtagaccaggctggccttgaactcagaaatccgcctgcctctgcctcccaattgctgggattaaaggcgtgtgccaccacgcccagctaaatacttgttttataccatagaataatgatttcaatattggttagagaagtttctttttgctgtaggcattggataatacagaaacttaaacctgaccaaagtactgagaataaataaatcctagttaaacaggccatctatgttatctatgttatctgtctccctatgcccaaaacttatccaaagagagggagaaggaatgtaaaaactggaagataagaagaaggctgtgcactagtcaatttcatgtcaacttaacacaagtcagttagaaaaagcttctataagacttgcctgtacatacatttgaagggcattttcttaactaattaagaaaatgagatgacccagctgatgggggatgatgccatcccctgggcacgtggtcttggatcatataaaaaagaaggctgagcaagccagtgatcggtgtttcttctaccacctctgcatcagctcctgcatccagacttctgccttgagttacctcattgactgcaaaccctaggatcaaataaaccctttcctccctcccaaagttgcttatggtcagtgtctttatcacagcaatagcatcaatcctaagactaatgtaaaatgctttcttctggatataatataccattattctcagggactcacagcacatctgtaggttatgtgcacaaaactgagcctagcaacagtccggcatggatgaagaaggggctcatgaggacccaccctgactgagaaggtttggccagttcatggctactaggaacctgtgctcatgaaacaattttccttaaactcagtgaattatttaaacaaacaaaataagcaaacatatggcacatgctacaatccagcacttgggattgaggtaggagatgaaaatttcgagattatcctcagccacacaacaaattcaagactagcctgggctatatgagatcctgttgtccacataaaaaccagagatcttatctttctggttttttgaaacaggatttctctgtgtaatcctgattgtcttggaatttattactctagaccaggctgaactagaactcagagatgcacctgcctctgcctctgcctcctctgcctctctgcctctgcctcccaagtgctgggattacaggaccgcatcaccaccacacggctacaacattcatctcaaagagagtaagaggtgatttattctactagagccattatgagtgaccacggcccagggacacagatgtaggttataccaaagtcaatgttccaatgcagaagcagtttcataaagtttttatggttttatagaacagagaaagtcataaattaaggcaagtttaaaatatattggtgggtggaaaggcccaaggtgctttctggtgacatttgtagctctcaggatagtgaaaactagtgttcagttaatagcatctaagaggtgcttagtatattttatcatgatgtgttagttcagatacaatatatggcaagaaatggcatcttagaaggctaaaagtaacccaagatagagcgaccagcttctgaacctacaaaaccctgtctccaaagttctgagatccccagcagaatctgcaaacacagactccttctggaggttttgttctcagccagacagcctcgtttcagggatgtttgttcgcactgttacaaaggaaaacaaacagaatcagaagtgaagaagcaaaactggcattgtgaaatgattccattacaaacaaggaaagttagtaaagatgataggtcatagatgttcaatacacggcttagctatttttcatttacccacaatatctgacaaacaaaattatcatttaataaagcaactaaatccatagaaaatccaacaactgacctaatgtaacatgtgcaagaatgttttagggagaaaaaaaaccctttttaagctttgatatcagttgtgctcactaaagaaagatttgcacactgtgccatcgactgaacccagccctatgttctgtgggtaactttccagtgctgcctgcattaacttctgttactcccatgttaaaatgagtaaattcaggctcatatacgtaatttttgcaaggtcctaaatctttgacaggatgctgctttgctgggaagccatttgagttccactcaacatttgtagtggctcaagaaaagcaagcagatcatggaattttttttttgcagagacctgtgccagcattggatttttagagatagtgtttcacaaagaggaagcattgacaagtaggtggaattcactgtgccctgtaaggtaactgctgttgtggaaaccctcttcaggtgtgagccagctcatccctaagccacagctctatgtggaggtcagtgagtgggagagcacatccagccagcatgaactaagggggaacggtactcagagcaggggcctggaggcatgacccaggcccatatagcaaaccagggcaaaaaaacaaacaaaagtagcctccagctcctttggctatttgagataaaagcaatagtcaagtaaactaggaaagagtaatatcagttccccacctgtccctttgtagtataaccaagaaagagaactttatattgggtttcatagagattttaatattaactttttaaagagtaaggtttagtaggcctatatctatctactaaagggccactttgctgctatcttcctgtaagaacgctgagggccttcttaataaatgcagcctgaacgtggacctcctttcacccccattccccctgctctcctttaaaggaaacagagagaaaccctggatatagaggtagctgggaagtgaagaaacatgtaaatgactatgacagaaagcgagtgtcagtctaatataaaaggatatgggttcattatttctctcacagagacaataaaaacaacagaaggggcagaaaaagcatgactagattttaaatgaaaaactaaatcttactgagatatctatatccatctcaacaggccagcatgtttgagagtacagaggatcaatagtgtcatgaataatttccaggaattggtaatcctgaaattcaccagagagaaaccaggtttatggttttgagccaaatttgaaccaaggtttaattaaatactgacaaggattctgttcaggtccactcttgggaatcccagcgagccacattttataggggcttttaaaagggtaaaaccacagggccacagtattcctcaagtggctttgttattttccaaaagccactgtttccagcattctaggaagttaccttgtccttaggcaggtggggcagatagatgactttgacactcacagaatctgtaaggtgagcgctcctagattcatagagtatttaagaaggaaaagatagtctcatgaacacacataccataccagaacttaaattacctctctctctctctctctctctctctctctctctctctctctctctctctctctctctctgtctttcatatatatatatacatgaccagctaataggggtacccctgagttacagctcagtccttggcctcaggcagttagagggtaagctaagcctgtcccctttgttttcctcactgtatctatcacataacatctggcagaatttgtgactccaaataatnnnnnnnnnnnnnnnnnnnnccctcccctcccctcccctgtagcacagcctgagggcaggggcagggatttcccacatgagttcacttagtgtttagtatagttttcactatcctgggtttttgttattccaaatgaatttgagaactgctctttctaactctatgaacaattgagttggaatttgatggggattgcattgaatctgtagattgcttttggtaagatggccatttttactatattaatcctgccaatccaggagcatgggagatctttccatcttctgaggtcttcaatttctttcttcagagacttgaagttcttctcctacagatctttcacttgtttggttagagtcataccaagatactttatattgcttgtgactattgtgaagggtgtcatttccctaatttctttctcagcctgtttttcctttgtgtataagaaggctactgatttgtttgagttaattttatatccagtcactttgctgaagttaattggtttaggagttctcttgtggaatttttggggtcacttaagtatactatcatatcatctgcaaatactgatattttgacttcttcctttctaatttgtatccttttgacctccttttgttgtttaattgctctggctagaacttcaagaatgcattgggagagagtgggcagccttatctagtccctgattttagtgagattacttcaagtttctctccatttaatttgtttttggctatcggtttgctgtatattgcttttattatgtttaggcatgtacctcgaatacctgatctttccaagacttttaacatgaaggggtgttgtgttttgtcaaaggctttttcagcatctaatgagatgatcatgtggttctaaggacccaacagaaatgacattagccaaaatacccaacacaggggagatagaacctggaaagaccatatccagtggataggcagaacccctggttgaagaatgtggccacccacccatctcaaaaaatttaacccagaatgttcctacctaaagaaaatactgggactaacagtggagaagagactgaaggaaaggtcaccagggagtgccccacctaggtatccatcccatctgcaaacaccaagcttagacactgttgctgatgccaagaagcgcttgctgacaggagcttagtcaggctctggcctgagcaatacagatgtggatgcttgcggccaaccattggactgaggacggggagcctaagggaagagttaggagaaggactaaaggagctgaaggggattgcagccccataggaagaacaataatatcaaccatacagaccctccaaagtctggagggactaaagcaccaagcaatgagcacacatggagggaaaccatggctccagctgcatatgtagcagaggattgccttatctggcaccaatgggaggcaaggcccttggtcctgtggaggcttgatacccagcatagggggatactagagcggtgaggtggggtttggtgggtgggtgggtaggaatactagagtgatgaggaacaccctcatagaggcagagggaggggataaggggcttgcagagaggaaactggggaaggggacaacatttgaaatgtaaacaaataaaataagcaataataataattttttaaaaaacaaaacaagtcactgcactcctctgtgcaattgctctccggaaagtggagtgggcttgccctcgtcctgcccactggtactgcccttttcatgtttgctctcagctcgcaaactaagttctggcaacatccccacatatacccgtaagcacactgtttggatgcatgtggagatttcccacactaaagtgagtgagtttgctatgtgaataaatgtaactttactttctgaaattctgttagttttgtcaaatctgccaatccatttttatatcttctgtcataatccctcaataggtctgttcctcagacttattccatagactcacttattttttgtttttaattactttaatatgaatacatttttttctattgcaaagcaagtgctctgttgatgagcttctcaatggaatctagagcagcatttctcaatcttggaggtccaactactctttccacagggttatatagccaatatttacattatgactcgaaacagtagcaaagttacagttatgaagtagcaatagaagtaattttatggttaggttcacaacaaaatgaaaggttctagcattagaaccgctgctcccgagtttcctgtgctgtgcatgaggcttcgtggggagtctacatgttttccccatgtggatgaggctttatcatggaagccagagattctctccttgtgaataggatttcagggagtatagagcttttgccctgaacacggggcttcatcgtggaccctagagtttttgttcttctgaatggagtttctgggcctagagatgctgtcctttgccttattgttttgtttgcatctagttgtcgtgtcctctctcaaccagcaagaacgacacgaccaccagtccttctaacagcagtttattcagtcttcatctttcttcttgtttatatctcccccaaaccctgggcctctcactcttatatactctcagttcccatccactcacagcaggccatgtcacctcaccaggcacgcaccttcagctaatcagggcagcaggggcatatctccaccaaaatggattcgccagtatcctggtacacctgcgtagctctcatgatggttgtggcttatagtcaggtgaggaagtcaggtgcaagtcataagacttagctgcagtccctggcgcctttgggactgccgccacacccgctcctcacatctagtattttcctttatatagcaatgtacactgacaattttttttatcctccatgaaatcacttttgagaatgtgtcactttaagttggtctttgtttacctaaggtggaagtaaaaaaaaaaaattagaaacttacttataatgggcttctatgaatgctggcctctgaacttaaaattgggaggatcatccctggctatatatcatattcacatggcttccagctagggcaatgtctcattgcttttgtcaacttggcataaacctagacatggctcagatggggaaatcttaagtgagacaatacctccatgacactggactgtaggcaaggctgtggactattttgttcattagtgattgacacagaaggttccattacacttagtatcatccctgtgcagatgattccaggttcaataggaaagctatgtcagccaagcaagacgtgagaagtagccattaggaatgtgcctccatgacctctcctcagtccctacctccaggttccagtcttgagttcctgccctgacttccatggtagacttacctggaagtgtaagatgaaataatacctttcctctccatgttgcatttggtcactgggttttatcacaatagtagtagccctgtctaagaatgaccttgatctttcgttggggtagtatgcatatctatgatttttgtgacttctcaatgagctttcactttatcgttcattctcaacactgtgtactgaaactctttccactgttgagcatccactcgggaagaggacagaaatgaggaaagatggcacgtggtctctggaggatagtcatctttatcagcttttcaaccacaatggctaggggtgcatgctaaaaaatatttttgtcaactgtgttttgtggctagtgatctaaatacttgcttgtacaaaatgaaaacaaagtttggcaagatgattcagagggcagaagcagctgctgctgctgcagagcctgacaatttaagttcagtcatcaggactaatatgatgagaggagacagtaacctcccacaagttgtcttctgaccttcacatgtgtgctagctcacacacacacacacacacacacacacatacatacatatacacacatacacacacacacatgccacacacttttaaaaaaaagtgtacttgaatccaacctcatttgcccttactcattattatgaaggtgactttagtagagttttgggaaagaagacaggaaccttcttgattctcaattagaaaataaatattctgctttttacaggtcctgccttctagtgcaggatgcctgtggcatgttcggggaagtgttcttgaacagcaccctctggaagagcagacagttagaagggaagtcctgcagcatgtcgggagtgaaggttctacagaaagctacaagaggaaggtaagaacatgctggaagatcatctactttatataataacaaataataagcaaactttttggcttttatctcagatttttattttttaagacagtaagccagtactgctcatacttggattctacagtaagactggcagttaagtgaccatacagtgtccctatagaaacataattgataaccaaaataattaaacaccattctgatttatattttgttaaattaaaagaaaacacttaataacagtatatcacatgtatgaagtgaaatgcctctagtaaaaatattgattgtggtggtttgaatatgcttggcccaggaagtcacactattagggggtgtggccttggtagagtaggtgtgtccttggtggaggaagtgtgtcactatgggagtgggctttgagaccctcctcctagctgccttcagatgaaaatgtagaactctcagctcttctagcaccctgcctgcctgaatgctgtcatacttcccaccttgatgatgatggtctgaacctgtgagtctgtaaaccagtctcaattaaatgtttgcctttataagagttgccatggtcatagtatatcttcacagcagtggaaacccaagtaagatcattgctgttactattatctaaatgtttaatttttttttaagtcctctcatttctagaaattagtacattctggtaataatatttttacctctttgaatactgtttcaagttaagatagtttaaggatagcaaaatttgcagcaataactgtttaggattagttttaactagagacctaggttaaaaggaaaggtttctatcagtccagatctttccactggtcctacctcattggctggccagaactttcagcatcttggaaccagctgatgaaatctgaccatttaagtcataataaagagaaacagaaaacaaaaacaaaaataaagatttttaaaagttgtatgtatattttacttcttgaccctgtaattgaagatttcttgtctgtagttttctaaagtatgactgtaaaaaaaatctcgttaatagtacatatacatgaaagtctaactcaaccaaaagacataaaacttttttttttcccttgagacgaggtctcactacgtagccctggctgacctagaactctcatatatgtaaaccaagctggcccaaaactcacagagatctacctgcctctgcttcctgagtgttgaaataagtgaaactgttttaaattgtcaagtattaatggtgttttctgtgtgtgatagcatacctctgtaattccagaacttaggaggtagagatgggaagatcagaacttcaaagccatcatcagttacatagtttgaggccagccgaggctacatgagatcttgttctgttgcaagtgccgtggcatctcaccttgaacagtttgagtagtgggagatgtcatggtgtacaggctgtccacaccatggttcttgcttcatcagtaatcattttattctgtacattggaaggaataaggaacacatcttttcttaagtatttttaaattattctttgtcgagttcatagatgtttacaatgttcctccatcatatgttcccctaactctccacgcccaccctcagacattcgcaacacttttccttcctatcctgagaacgccctccccccactgactccaactagtgctgccctctagagtgctcactcatcttcctactgacttatcttgttcaggtctgtgcagatagccatagctgctgtacgttcagaagtacaagggctatgtcatgtccggaaggcgacatttcacagcactcctccccaccccacaactcgtgtgtcccctcttccatgactcctgctggggtgatgtaaaagtccagtttagataagagcacaacacatctgcttagcaaaatgaaagcagtgagatccatggcaaggtttgcagcagtgggcatggatttcttctgtggagtatgccgcaagtccagtgtgataatagttgttgtcttagttggggttactgttgctatgatgaaacaccagtatccgaagcacctgggggtgggaaaggttctatgtaactgttcatcatcaaaagcagtgagggcagaaactcaagcaagataggaaccagaggcaggagcacatgcagaggccatggaagggtgctgcttactggcttgtttccatggcttcctcagtctgctttcttagagactccaggaccagcccacggattactgggccatcacccatcaatgccctatatgatgcctgtagcccatcttatggtagcattttttttcttttctctttctttttctttttctttttgaattcattttattatttgacagatacgagtattttgcctgtgtggatctgtgtgtactatgtgcctaaggaggtcaaaatcaggcatcggatcccctataactggagttacagacagttgtgaactgcattgtgagtgctaacccagtcctctgcaagaataacaactgctcttaactactgagctaactctccaaccctggaagcattttcttaattgaagctccctccctgcagatgactttagtctgtgtcaagttaacataaaactatccagcacaattggttacctctgagattcatgccactgtttcatcaatgagcatatctaggaagaaaccttttctaaaaaagtatcctataactaaataccataaacagtaaatctaaggttctcaaactcattgttgcctttcttcaagtcgcatagtactccttcattattgataattatttaattatagtagtacctgagcttctagtatcactccattaagtccgttacaagtcagttacattctgaatcgttcgttgacagcaacttttctcctttgtatgatgactacccaatatgaccattctaagtcatgaacatccattgctatttctcctggctggcctcgtctctgtcctggaagcccttcctgtaacaccttgcagatgagtgatggatctgtctgagagtttatggacctggaagaattatgttccataaatagatttgctataggataaacttggagcagatattagaacatcctatctgttatgcttatgtgtcttaatagcaattacctccttttttgtattcctacattatagtgtaattacactatacaattccggggtaaaagtgaagatttatttgctcaggcatttggaaagcgtatctagacataagacaagcttaattgggcatatgaaccccattcttactaaagtcgaccctgacttcaatccttactctaatatttttatgaacacttttcaaatcagaacactttgaaaactgagagtaggtagatcaaatatctacagttagactcactccagcaaggctgctctggtcagagtgcctcatgactcagtcttgagctgctacctggctcaggatagcccagagagcccctcaggctagagactgtgggaacacattgtggaaattctgatacagataggcatagccaggcctgagaccagggatctttgcctatgtagaattgatgttcttccaacatcatgttatacacgtactttagagttgacatagttcttatgtgttactctgggaggatcaataccatctttagcatttcaaaggaaatgggctttccatagggagtgtccaataatccagataatccatctacaagtgatcctcctaggcctcactcatgctcagtgagtgagtgctctctacctacataccaccttaccaaaaaatgtttgaatcctcttccatatttaacttactggcaaaatacttgatgcttttaggagttaggactcatttctttattttatgcatttcactttgcttcggcatgcagccatccaaataaatatttggagtatctttttgttcttttggaagctgtgtttcttcaaaacaaattactaaacacttttggaatgttggatgttataattgcctattagtgacatcatccactgtcggtcatccacccatagcccggaaaacaaggtagtgcgtcttttatgccccctattgtgtttgttagcaaccctcctgaactctaacaaaatgcactacttgtaaaccctaacaaaatatgactatttacaaaaatgtaggtcaaaataattacatgtccaattacgatatatagaaaacaactgtttttaaaacagttctaagatacttgtatggttaagctaaaacatactgtctttcagatctgctgtagcagatttcacgtgtctacagttttagtaacagaacacccgtcacccctcattgccacagacagaccggctgctgcacttgcataaggagctccccgtggctactgcctcacgcaggaaggtttactgagccacaaccagcatagttttctgacctttttttaactgaagtgtctatacttactggtaagagtaagatgagtccaataacctccatttaagttcagacaagtgtacggtgtccaaaggcatcctggcgagctgtgctacctgactggctgcagctctgcttgtgcttcctttacatgattcttgctgtgcttggtccaggtcccttttccaaagctcagcctctgacttttcttttcctgaatgacttacacatcaggttagcaagccaaacagagagctcacattacttttacatcatattctctatatgaacttggtctttattatcaactctttaattttaaattgcagggaatgttaaggaaatgggcaggaaatctggaacgtgtaacctgcaaaagtgataggcagcaaatgcaaattatttcatggagcaggagaatgggggaacttatttcagttcacagtcctctaagtgtttgggtcaggcatggtggtggcactgataagtccagcaccggggagtcaggaaagttgatcactgcaaatttgaggccagcctcatgtacacagtgagcttcaaaccagctacagatcctgcttgcttatttttggataaagcattaggttttgcctaaatatgattagtattttgaattgttatatagttgccaatgcaggaagtgttgtacaaacttcaaaatagcagaagtatgtttggtaccatttcagagatcacatgactattctgtcctaaacacaagccaaactttgtgtagtagatttttacaaaactcaagtgaacaattcaagcagcagttttaaaaatcaagcattctaacaacaaaatacagatactcttaatgtggtacttaagtgctgaaaaatgataggaagatattaaaaatgttttctacaactatatgtctctacatgttcagaattgtagcaaatctgaatgtttgtaagtgctgtaggacattgcagcatacagaatgtacatgtgtgttcagcatgaaggcttctctgaggttgagcaccctagcacaggaaagcactgccaggaacacctcattcatttttttgtatttgattcaaaactaactttgaatgttgaccactcagaaaccttttcctgctgtcctatctccataatactcagtcagttaggaaaagctgtgccatagggagaaggtgcaaacatcacgtagaaagggcctctgctccctgggtgggaacacatggatgggcagatacctggagccctcaccaacaaggtggacgattctaggtctgtgagaaacagtgtctcaaaaagcagggtagaccacacctgagaatcaacactggaggttggcctctaacttccacatgcacgtgcacataagtgttgcggtaaatctctaacccagataagctcaggcaatggaaacatcactcaattaatatgaatacatgctgtgcacctagattgggcagacataccactacactaccatcttccccttataacttgcagtttctctaggccaggtgcttctactccactttccttcttcctcctcctcagttgtgtcctctctctctctgtctctctctctgtctctctctctgtctctctctctcttctttttctcccaactctaggctttattttgtaaattaaggtgggaagaaggtttaccagaaatcacctgactgctgacaccttgttctcaacccctcacaggagaacagaattaacatcaaatataattagctccagggcctatctgcaacacataagcacctgcatacataaacacaaggacctgtaattaaccaattagttaaaatgcacttcctctttggtgaggtgctgctcacatcttgtgtgtgtgtgtgtgtgtgtgtgtgtgtgtgtgtgtgtgtgtgtctcccaggattactgggtatggctttgttgaagtaggtgtggtcttgttagaggaagtatgtcactgtgggtgggctttggggtttcaaaacaccagtcccagtgtctccacatctggatggagagctctcagctacatctccagcaccatgtctgcctgtgtgatgtcgtactcctcaccatgatgaaaatggataaaacctataaaactgtaggcaagctccaattaaatgttttcttttcttttataagagttgtcatggtcatggtgtctcttcaaaacaatagaacatactatacatgtagtgtgcataaacatgaaagtgcacatacatagtcacacacacataaaaatagagatatcttttttaaaacttttagtttggactggagagatggctcagtggttaagagcactgacagctcttacagaggtcttgagttaaattcccagcaaccacatggtggctcacaaccatctgtaatgtgatctgatgccctcttctggtgtgtttgaagacagctacaatgtacttgtatacacaaaataaataaataactcctttaaaaaaaaaaactaaaaaaataaaacatttaatttgtccaatttcctaagcttgacaacagtgctcaacagcagggtgacttgcttcccgtgtctgcaagtgtaaagtgtaagccaggtgtggtgctcatactgtaatcctaagcacttgggagctggggctagaggatgcctaccaatttcagaccaagctatctcagaccctccctccccaagtatcacttttctgaaggtgacctaatgatgaaagtgttccaattctgggcttagggtatcctttctagaaaatcctgtcttaaattagtgatcttttgttttattttgtcagaacacagggacttttacctgctctcctactggcatattctacctactgacacttttaaatagcagcttgatctagatacattttaccattttaaagtgaacagccccttatttttctgttcttcaccaagtggggcagccatcatcactgccttaattccagaatatgttttaacgcccctgcacagtgacagaaacaaatggacctaatcgatgattgttagagaggaggtgctggagggggtcactggtaagtttcccctgctcctgtaaatagaccttcacccatacttttataagttacccaacacagacacagaacatgaaagtagaggaagagggtagggaagagaagggtcatcaggaactggaggacaagagagggtaattggggtgaatatgatcaaaactgtcattataattaacgtgctaataaacagcttctaaaaagggaaagttatgctgattggcagtcactccctattccccaactctggtcaactctgccttgttctttgcttctgtggacttaagataacaggtcattcatcatagagcccagacttgccccaaactcactatgcagccagattgaccttgaatttgtaagacatctatttttcattctaggcaagtcagggccactcaaaaaaggaagttacatctctcttaaagctatgtccactctcaggagttctttcttgttttccttaataaatttacattctctgctccatatacacatgcacacacgtagacacacatgcacacacacgcaatagagagcaccgagttaattttcttttaaagacttattttattctatgtgtatgattgttctcccctaatgtgtatgtgtgcactgttctttcagggtgtcctcagaggccacaagagggtgtcatatcttgtggaactagagttacaaggaagcaaattaacaaaaagctattacccaataaatagtattctcattgtctttaccacctcccaaaccaatttctctttgaattttcctattctgggcttattaatttaaaagtatattatattaagaatatatatgtatatttttgcatgtaaactaatagttcattctgcatctctaaatttttggtgtggacaaggaaattttcattgaacatttttatgagtggaatcattcagtccatgggatttcatcatttgtttctttccattattataatgctaaggtccagctatatcacagcacacattaatactttttttttacaaggccaaaatatatctcaaggtaaagataatagacattttatatatcctgtcatcagtgtgtagacacttgggtgtttttacatttcatttttataaaaactgctgttataaaagaattttatgtaaatttgtgtgtgaatataaacttttcatttaattcttgagtattgatgagatgcccttataagtctcaagcaattgaatacttggtcctcaattgttggctgtttagagaattaggtttgaaagattgactttgcgttagtcctcccagtttcctgcttgcagttggagatgtgagcttcagcagtctgccttctgctgcatctgctctgcaggcatcatggattgttactcttctgaaatggtaagccccaaataaatcctttcttctataagttgcccttatcaaagcaatggaaaagtagctgagacagtatcctagcttggtttccattcatgtgataaacaccatgaacaaagcaagtgaaggaggaaagggtttgtttcccttcacaaattacatccatccagaaggaggtcaggacaggaagatgaaggagaactgaagcagagaccatggagaaatgctgcttactagctcgctcccctttctatgggtcagttttgttttgttttgttttgttttgttttgttttgttttgaatacaatttcagtccacctgacagggatggcatggcacacagtgggctgggcctttcacatcaaccatcaatcaggaaaagcctacaggcttgcctatagaccagtctaaacaaaggtgttttctcaattgacgtttccccttcccagatgactcggttttgtgtgtgtgtgtgtcaagttaacaacaacaacaaccaaaaaataaccggcagacttggttgttaatgtaagtatatgtttaattcttttaagaaacttaactaactttctagtgtgaccacacccaccattttacatccccaccagcaaaatgtgaaagaaggttttgcatcctaaccagcgtcaggagtgcgcatgtttccttttaggcattctaaagaagcacagggatatttcattaggagcttcacttgccctctctcctaaggatgagtgacagtgtttctcaatacctgcttatatgacatcacatagatcctctctgggaaaatcctctgcattttcttgccattgccctctccttattttttaactggatgctttgtttccccacctgcttttcattcttgagttttgagaattccttttataacagatatgaaatgtgaatattttctctttgtagcttgttttcactcttttaccaggatcttttcaatacaagactttaattgtgatacagtccaggagctggcgatgtggttcagttggtggagtgcttgtttagcatgcacaaaaccctgggggttcaatcccagcacatcataaaccgagcatgaaggcatatgcttataatcctagcacttaggaggagatgtcaaaagaatcagcagctcaaattaattcttgtttatgtagtaagttcaaagccaggcttggatacacagtgggatcagggcagtgaggagaaagatgaggggtgtggcacagcatgcatatggaagtcagaggccaactcttggttacttgtcaggggtaagaagatgagttattcacatcttcctgggagtagtgtcacatagaaaatattttcaatgaaataataataagaaaatttctggaatctaggggaaggagatggcctttcacacccaagaggcacacagtccaccaaaataacaagaccagaaaagaaacaacacatgctgtattatagctgaaacaatgactataggaacagagaaagagtactgaagcaggaagaaagataagagccacatagaaagatgggcccatcaaaatgagaattctgatttttcaatggagaattaaagggcttagataggcatatttcaagttcttaaagatcacaagtgccaatccagattgacatagttgtcaaaattatgtgtcataatcaaaagagaaagaactcttcataataaaaacagtaatttatgactagtaagccagccccacagaagagactggaagaaacacttcacactgaagggaaagattaataatctaataggctacagggaaaacatttaagccatgctaacacaggtgataagaaagagaggactaagggacagaaaggactaggaaattatcaaaatgacaagaaatacacactgttcagtaattaataccaatagcctcgactcctccatgaaaacattgctttagaagacaggatcatccttttaggtgcttctaaaaaatgcctccttatcaaaggtagatattatattaggatgtgagcttggaaaaagattttccacgcaaatggaacaaacaggctttaagattctaatatctgagataatagactttaaaccaaatacagtcagaagagattaagaaggtccctttatttgatcaggggaacaatctaccaacttcatcacaattctaaaagtgaataaaaactgaatataggtcaacccaatttcataaaatctattagatataaagccagaggttaatcccagcttcaatatccattcttaccattaggtgagaacatgtgtggcaaaaacaaaacaaaacaagcaaatattgtaattaaatgatctcaaagcttatctagcagatagtacagaacactctacctaaacactatataatatgcatttttctcattagcccatggactttctttaaaacagtacattcttggaaaaagcgaagtgtcaattaatataagaaaattgaaatactgcttgtattttatctaatgacaacaggataattgctggaaatcaacagcaggagaaactccatacaatgtgtagggtaaaaggcttgagcccacttctgggtttgagaaatctaccaaaccctaccaatccccaccccggggagctacccacccacaccagaaaccttataaagcctcctcctgctcagttctccactgcttctcccccaagcagagatggccaccttcttgcttctctcccaataaatctttagctgtgtagtgtgactttgaacggccaggatacttttcccttcagagccttgacacttacagtgcattgcggacccttccccctcagagctccaatatctctactgggaaagcctttcccatcagaactgtaacacttacaaaatgcataaacttataaggattaaataatgcactattgaatgacgagtgtgtctttaaagaaatcatgaaggaaattctaaaaagtcccagaactaaatgaaaatacaacatatcaacacatatgggatacaataaagggagtcagtcttaggaagggaatttatagtttctaagtgcatacttaaaaaacaatcagagagatcccaaaaaacttaatgatgcattttactacactgggacctctccctccaccccccaaagaaaatcccaaatcagtagtagatggagagaaataattaagacagaagagtatataagtatttttatttaaaattgtgaaaagaatgtgaaaggaaaaatatacttataaaacagcagagtcctttccttgtccacacaacttagcaaggaaacatgttctctactcagaaaggtcatagtagctttgacattacaaatcagaaaaatgtacacatcttaatttttaagcatagatgacttatgaactacatataattcaatcattattttaaaaagcacagattctacctttcagtgtcccatacttaatgcatttacacaatagggtcttatttaagtgctaatgtttgtgatggtttattatgtagtcatttaatggttaatatgttatgcaggatctaagttgtactgtgaatctattattaaagagtgtgttacatcccctgaaggtggagtacagtgtgttgttaatgacctgttgtgggtcctaggaattgaactctgatcctctgcaagagcagcacgagctttttacccaagacatctatgagcaaaaattaatgatgaaatacaaacaaacacaaaatagcaaatgacaagggtacaaagaatcaataaaacagagagctggttcctgaaaaagataaacaagattgacaaaccttaaccaaactaatcaaaagagagagaaaatcaaaattaataaaattagagataaaaagggagatactacaacagaagtagtatcttcaaagaaaatctattttaaaactcctttgctacaccaaattggaaaacataaaaagaacacgatgaagttctcgatgagtaagacccatggaggataaacaatgctgagagaataacgtagacagacctttaagaagcaggtgcaaattaaaccagtaataaataaaaattaccacacctaaaagaaacagactcactacaaagtttaaaggactaacaccaatattttttatttgttttgtagaagagcaaaagaggccgtgcagcctgaaaggggagagctgagtagtgtggtcaggaacagtatcaaagagaagcactagaaacacataaagacatgagaaatgaaacaggacttctccttcatggacaatgctaaacaagctttacagaatattatcatgaatttttattttgatagagggtcttgtgatgtagcccaggctaatctcaaactcatgtcttgccttctgtctaaacctcactaatactggaattatagggatgagccactatactcagtcagatttatttatttatttattttaattggatattttatttatttacatttcaaatgttatcccctttcctgatttcacactccccagaagccccctataccatcactctcctcctgcttctatgagggtatgcccccacccactcatccactctcgcctccctgccctcacattcccctacattggggcattgagccttcatcgaaccaaggacctcttctcccattgatgcccaacaaggccatcctctgctacatacacggctggagccatgggtccctccatgtgtactccttggttagtggtttagaccctgggagctctggttggttgatatagttgttcttcctatgggcttgcaaaccccttcagctccttcagtcctttctctaactcctccattggggaacccgtgatcagttcaatggttggctacaagcatctgcctctgtatttgtcagactctggcagagcctctcagaagacagctatatcaggctcctgccagcatgcacttcttggcacccacaatagtatcagagtttggtgactttatatgggagggatccccaggtggggcagtctctggatggcctttccttcagtctctgctccacactttatctccatatttgctcctgtgagtatattattaccctttataagaaggaccgaagtatccatactttggtgttctttctttttgagcttcatttggtctgtgaattgtatcttgggtattccgagcttttgagctaatatccacttatcagtgagtacataccatgtgtgctcttttgtgattgggttacctcactcaggatgatattttctagttctatccatttgcctaagaatttcatgaatccattgtttacaatagctgactagtactccattgtgtaaatgtaccacattttctgtatccattcctctgttgaaggacatctgggttctttccagcttctggctattataaataaggctatgatgagcatagtggagcatgtgtccttgttatatgttggaatatcttttgggtatatgcccagaagtcctcaggcagtactatgtccaattttctgaggaaccgccaaactgatttccagagtggttgtaccagcttgcaatcccgccagcaatggaggagtgttcctctttctctacatccttgccagcatctgctgtcacttgagtttttgatcttagccattctgactggtgtgaggtagaatctcagggttattttgatttgcatttccctcatgactaaggatgttgaacatttctttaggtgcttaatggccattggagtttccttaattgagaattctgtttagctctgttccccgttttttaatagggttatttggtgggatctgggtatagagagctgtggcacagggtcagttcaggggcacagatataaactggaagaatcccattcccagctgttctttggttcctgtgtcctgatggctctgggcaggtcactcttaggccaggcatttgagtagaagtgctggtctcacctgtgctctcaggtgtgtcagctctcttgggagaccagctcactccccgtgggacctgagtatggagatctgtcagatcttctttaactgtcggagaaaatcaacaatgaatccatttggactttgatgtcttttggttgggaactattactgcttcaatccagctctttgctatagattcgcttaaatcacttatctcttcttggtttaatttttgtgtgtctaggaaactattcacttcatccagtttgctgattcagtataacataaatctttaagatatagtctattatttttctgaatttcattactatctgttgtgataatacctgtttcatctataattttatgaaattggatcttgtctttcatttggctactttggcttagagtctgtaaactttatctactttttcaatgaactactttttttaattagatattttcatttacatttcaaatgctatccccaaagccccctgtatcccccccccccccgccctgctcccctacccacccactcccacttcttggccctggcattcccctgtactggggtgtataaagtttgcaagacctaggggcctctcttcccaatgatggccaactaggccatcttctgctacatatgcagctagagacacgagctctgggggtactagttagttcgaactactttgttttatagcttcttttattgtttattctttcttttcaattattatatgaacttagttatttctttgaatttaccaatttgaagtttgtcttgttttgtgaaagccccccagcatgactattaaggggcttttcttttttctttttttttagatatctcttattatttttaaaatatagttaacttctcctcagaactgccttcattgaatctcatgggtttggtagctgtgttctcattttcattttattctagaacttgtttttgatgaatccttcatccttcattagtgtctaattcaatctctaagagtttgtgtatattgtacagtttgtgatgttgcccaggctaatctcaaactcatgcctagtcttctgtccaagcctcactaatactgggattacagggatgagccactatacccagtcagatttaaaaaaaagaaagaaagaaagagaagagaagagaagagaagagaagagaagagaagagaagagaagagaagagaagaaaagaaaagaaaagaaaagaaaagaaaagaaaagaaaagaaagaaacaagtagcaatctctggcctcgtaaatacccactgtaatttacatagtctagcaggtgatggatgccattcagaaaaagaatcacccaaagtaggaacagccaagattcccacccactccaggccactggagggtgagaacaagtctatgttttctgtgtgctgaacaatcagctgaagtcacttactggcttgcctgcttagttattttaggatcagtgtctcaatctgagcctgctcatctgttagatctcctttaattactcttactcaggactcacagctctctccacagctctcacgagggccaagtttccctactactggaaaagtatctttctacatggaaagacctaaacagagacagaccaagaagctactattactttaagactcattgttcttgcagaaaacccttatctaggaatatcctcaggatctttaaaatggcctcttctgtcagaaaccagccaacccacccaccaaccaaccaatcaaccaccaacaccaccaccaaaacagaaacaaaaccaaaaaaacatgactttaaatctagttaggtgatgtcagctgatcttggtccactttcctctaggtatttctactcttatagggtacagaatctgctttctatagacctagttgccttgctggttaataaagacttttttcttctgtctgtcagatttttctctctcctggttcccccagcccccaaacctgatactaactacttgcaaatctcacagagcaatctaagcctttattttgaaggtggaatagagtagaatttgcttttagaaatttaaactacatcggcaacagaagacagaaaataacaagtagggaaatagcctggtctactgacctagttcatcctcagagagctcggtttttttcaaaccttgtgtatatttgggtgtaaactttccttaagagtctgttctgcagttgctcatttctctgggcccattactgtgcacatctagtgagcttatctaggaaatggagcattcagttaagaatgctggagtgttttctagtaagatcttttttattgtttttcattctcttatatataggagagtctttctgagatttgaaagtgataattcactgttttctattagaccagacaatatagagattgacaggactgctgagatgcctcagtgggtaaaagtacttaattagccctgagagtgacaacctgaattcagtttctgtgcctcatttgtgggaggggagaaacaactctcaagaactgccgtctgacctaagagagctgtgatatggatgttaataaacacacacacacacacacacacacacacacacacacacacacacacagaggagatctgcagggacaaagattaagcagagactaagggaatggacaagcaatcattggcccaaccttagacccatcccaccagcaagacccaattcctgacactattaatgataactgtggtatgcttgcaaacaggcgcctagcatgactgtcctctgagagacacaagataggaacaacttacagatacagagacctaaagccaaacattatatagagcttggggattcttgtggaagagttgaggggaggattgaaggacctggaagggatagggactccccaagaagaccaatagagtcaactaacctggaccctttgaggttcccagagacttaaccatcaacaaaagaacaagcatgggctagatgcgccctgcatatgtatcagatgtatagtttggtcttcatagaggctactcaacaactggagtaggggctatccctaactctgttgcctgtctgtggatcctgtccccctagctaggctgccttgtctggcttcagtgggcaaggatgtgcctagtcctgcagtgacttgatgtgtaccagagtgggatagtacgtgaagtggccttccccctctcaaaggagaagggaagtgggagaggagctgtgttaggagggaattgggaggagtatgtgtgtggctgtgataaggatgtaaattggatgaataaattaatgggaaaatctacaaaaacattaaaattcctcccttcatcaaaaaaaaaaatcttacttgtgagccaggcatagtagtgtacacttgtgatgacagtactcagaagtctgagaggagacaattttcttttaaaaaacatttatttattcttttatatggatgggatgtggtggagtgggagagtgtcagagtacaatctttgggggttgttctatctttttaccaggtgtgttacatgaattgaattcaggctatcaggcttggtagcaagctcctatactcactaattcatcctgccgccttggattgtgagtctcgagatcagctaaggctaccagataggatcgtgactgaagcaaaacaaaacatccctaaaacaaacactaagaccccaaacaacaaaaaataaaaacaaacaatagtaaaaaacaacttgaaatgaacttttgatttctaatatggtaaatattgagcaatagaaactaaatgtaccaatatatgttttggggaataaagctgctaaggttacttgctactctcacagagcatcacggattggttcctagcattcacatggaaagtttcaatcttctgtaactctaattccacaagatatgacatcctcttttggcctctgaggacaccctgaaagaacagtgcacacatacacattaggggagaacaatcatacacatagaataaaataagtctttaaaagaaaattaactcggtgctctctattgcgtgtgtgtgcatgtgtgtctacgtgtgtgcatgtgtatatggagcagagaatgtaaatttattaaggaaaacaagaaagaactcctgagagtggacatagctttaagagagatgtaacttccttttttgagtggccctgacttgcctagaatgaaaaatagatgtcttacaaattcaaggtcaatctggctgcatagtgagtttggggcaagtctgggctctatgatgaatgacctgttatcttaagtccacagaagcaaagaacaaggcagagttgacaagagttggggaatagggagtgactgccaatcagcataactttccctttttagaagctgtttattagcacatgttaattatgatgacattttttatcatattcaccccaattaccctctcttgtcctccagttcctgatgacccttctcttccctaccctcttcctctactttcatgttctgtgtctgtgttgggtaacttataaaagtatgggtgaaggtctatttacaggagcaggggaaacttaccagtgaccccctccagcacctcctctctaacaatcatcgattaggtccatttgtttctgtcactgtgcaggggcgttaaaacatattctggaattaaggcagtgatgatgattgccccacttggtgaagaacagaaaaataaggggctgttcactttaaaatggtaaaatgtatctagatcaagctgctatttaaaagtgtcagtaggtagaatatgccagtaggagagcaggtaaaagtccctgtgttctgacaaaataaaacaaaagatcactaatttaagacaggattttctagaaaggataccctaagcccagaattggaacactttcatcattaggtcaccttcagaaaagtgatacttggggagggagggtctgagatagcttggtctgaaattggtaggcatcctctagccccagctcccaagtgcttaggattacagtatgagcaccacacctggcttatactttacacttgcagtcacgggaagcaagtcaccctgctgttgatgtgtgcgccttcatgtttatgcacactacatatatagtatgttctattgttgtgaagaggcaccatgaccatgacaactcttataaaagaaaagaaagcatttaattggagcttgcctacagtttcataggtttcatccattttcatcatggtgaggagtagggcatcacacaggcagacatggtgctggagatgtagctgagagctctccatccaaatgaggaggcatcaggaagagagagacactgggactggtgttttgaaaccccaaagcccacccacagtgacatacttcctccaacaagaccacacctacttcaaaaaggcatactcagtaatcctgggacacataacacacttccatgtgtatccctagccgttctgaaagttacatagatttacctgcctctccctctctagtgttaggattaaaaatatatttcaccagcctaaattttttcaaaattcaaaaaccaatgatcagtgggtcaaagcacttgccactgttgtacatatacccacatagacatgtacggggacaatagtagtgataattatatttaaggcatacatgcttgtatattgtaactataaatgttttatcattttgtattagacaattatatatgtgtgtatatacatacatgcttacatacatacatacttacatacatatataccaaacaatccaaagggaaatacaaatgttgccccaaacccttctcagataaaccactcaaaacaattttaatctttagttactacttttcatttggcaagataactatgtctttatcctagaggttcttgtttttatcgttttggctgtttttatattgctttttattttatgtacattggtatattttctgcacatatgtttatgtgagcttgtcagatcctctggaactagagcacattagttgtgatctgccacatggttactggaaattgaaccctaatcctctgaaaaagcagccagttctcttaaccactgagccatctctctagccctgattttgttgttggtttggtttggttggtttttttgtttgtttgtttgtttggttggtttggtttggtttggtttgtctttgctaatggtagccgagatgtcttcaaactcttgatcttcctaccttaggctacatgtactggggtcgaggtgcacatgcctactcttcaggtgtttttttcatatccatttcagtgatgacatacacgtgcaggttcatcacagtataaagaactgtcttctttaagttcctgagtagcttgctgtcgggtcctttattggcaaatgtttgttgatgaattcctccaacagtgtctttttttgttccaggacaccagggctcttcagtttaattgacagtttgtggcccccagtgatatctctgactgagccttcctgtggccagcccagtggagaggtaagcccagccttggaaaaaatttttgtgcacagacacccgcccttctcaggaactgacttatgcactcccactgcagtcacacagcccatgtcatttcttgggcaacaagagctctgcatctagttcctttgtctggaatgatctatgaatgccatctagaaccgtgactgcagctcctttccagagccgacattctcatggttctttttcctgtctctctggtaaattcttgataaatttttgtttgtatttcagtttttgtgagaaatacatatttttgtatcttggcctcactctgaagcctacactgaccttaaactcaaaacagtccatatgcctcggcttctcaagtgctgtgactgcagctgtgtaccaccaaactcagtcatgatactggcattcaaactcttagcctcattctgaagcagacaccacagctttcccatttctttgcacttagttaccagttagaaagaacataaactagatccacagacagcagaaaactccctttcctcactacattgtgaagaaatgtgtgcacatgcatctaacaggcatatgtggaggaggccaaggcttgatgtcagaatatctttcttcaattgcttctccacgtcaggtgtttgatagaggatctctctcaaacctggaacccaccattttgattagattgcttggacagtgagcctttggggtccttctgtctccatacctcttatttgtgggttctggagaactgaactttgtagcaggaacttgccctaagagccatctccccagcttttnnnnnnnnnnnnnnnnnnnnnnnnnnnnnnnnnnnnnnnnnnnnnnnnnnnnnnnnnnnnnnntcgttttgttttgacactgggccttaggatgtatcttaggatgcccttaaagtcctgatgccccttcttctccctcccaagagttgaaattataggtttatgctactatgtctggtgtaaaggcgaaatctaaaacaaaatctttttttattttgttttattttattagatattttctttatttatatttcaaatgttatccccttttcctagtttccctccaaaagtgcactccctttatcccctaccctctccccctgctcacaaacccacccactcccacttcctggacctggcattcccctacactggggcatagagccttcacaggaccaagagcttctcctcccattgatgactgactaggccatcctcttctgcatatgtagctggagccatgagtcccaccatgtgtactctttggttggtagtttagtccccgggagctctgtgggtactggttcattcatattgttgttcctcctatggagctgtaaacgcctttatctccttgggtcttttctctagctccttcattggggaccctgtgcttcatccaatggatggctgtgagcatccacttctgtatttgttaggcactggcagagcccctcaggggacagcaatatcaggcttgtgccagcaaacacttgttggcatccacaatagtgtctgggattgtatatgagatggatccccaggtgggtcagtctctggctgttcattccttcagtctctgctccactttttgtctctgtaattccctccatgggtattttgttccccgttttagaaaggattgaagtatccacactttggtcttccttcttcttgagttttatgtagtttgtgaactgtatcttggggattccgagtttctgggctaatatccacttatcagtgagtgcatatcatgtgtgttcttttgtgattgggttacctcactcaggatgatatcctctagatctattcatttccctaagaattttataaattcattgttctaaaatgaaatcttaaatctacccaaattattcttatgcttagtctcccagatgcccgaactaacccatttcttatctagctttcccttgggaatatacatccaaaagcaaactgtgtgtgtgtgtgtgtgtgtgtgtgtgtgtgtgtgtgtgtgtgtgtgtgtgtccatgcatgtgtgttcactccagtctcaggaattaaagatagggtctccttcctactgggtaagtgtgttgccactgagttatataggtctcactaaatggagcaggctggccatgaaatctttgtgtagcccaggtaagccttgaacttgtgatccttgggtttttccctcccaagctgagatcacaggcctgcaccatcagccaagcataatcatgtgtatactgaagaacttatgttaatagtacttttcagtctttcaaaagacattcttactctgcagtttcctttctgttaaacagacaaagacttatctgcctcctcctatcttctgttatatcttctctgcacatccaacactgggacaaattgatgcaattgaagaccacatttccaagctttaccagcctccagttgtccgctgcttaaaagaaatcctccaggtaatggctgtgtttctaccaagttctttaaatacttttattgcttctatgtgctttgtgtgatatgttcagtcttctatgtctttccagactaatgagtgcagtacacgttgcagcttctatgccagagtgatttatcaaaaaccacaggtaatatcactgctctttgtcagtctgtctgtctcccctacccctctctctatcctatggaaaatctattggaaattaggatgacataataaaaaaaagtgcctctaaaatctagattaacccataatttaccctcctagtttggagtgatccttttctgtgtaaactatatggagcttgtcttagtcagggtttctattcctgcacaaacatcgtgaccaagaagcaagttggtgaggaaagggtttattcagcttacacttccatactgctgttgatcaccaaaggaagccaggactggaactcaagcaggtcagaaagcaggagctgatgcagaagccgtggagggatgttctttgctggcttgcttcccctggcttgctcagcctgctctcttatagaaacaagactaccagcccagagatggtcccacccacaaggggcccttcccccttgatcactaattgagaaaatgccttacagttgtatctcatggaggcatttcctcaactgaagctcctttctctgtgataactccagctatgtcaagttgacacaaaactagccagtacagagctcttttgggttttattgttgctgttgtatttaattttggtttcttttagagttgttttcattgcggagctattggagatgtttgttgttcgtttgtttgttttgtatttctctaatccatggtcaaaaagctataaaagtacccaaaaaatgcttcttaatttctaattgagttaatagaggattgcacatatataaataaaattcaaattgtctcatcatataaacatggtatattagcttcttcctaactataataaaggacaaacagggtttttttgtttgttcctttgtttttgttttgttttttaaggcagggtttgcctgtgtgacctggaactcaccatgtagactaggctggccttgaattctgagtgatcacaagtgcctctgcctcccaagtgctgggactgaaggcatgcatcactaacatccagttcctttaaagggccagatagttaatatgcaatggttcatggataatgcaatttctgtaaaaattagttgattttaatgtgcaaagaaagcagacatattaacattcataaatgagtaaacagatttaaaaagaaaagaaaagaaaagcacttcctctaaatctaaagcaaaaggaaggctgtctccgtgttttacataagtctacagaacacctggtgtatgatgacaccctgagctactgagacttcctgtcactccacattctaggcacaggactctgcaggccagtggtggtacaaatgccttttgcccttcaaggagaatctatagctcagaggctaagagtgagaaggacagggtcaaatgtcaatagcagatggagggaaacagagtggtagaagacatgttgagtcctccacctgatgacctcgtggggctgagtaggcatgctgacagccttatatgtaataagcagattccaaatatgcaagggcaatcggcttggctttcagtggggtgggggtggggtgtctgatgatcctatgttgaggaacaagttgggaacctagaactatcatccatgttcaaatactttttctaagttacatggagctataagaatgccttaacagattttatgtttttgagtagtttggggtatatataaaatcaaggataaggtaaaaaatgtcccacaaatgcctgcttcatagatatatagtcccctgttattgtcgtctcccactgctgacatggttgcctagagttcttagttaatgacacttaatctccattataacttgagacagaatcattactctccaagtcctctgtgctctgcctgttcatcccttcctcctgcagaccctttagcagaccgtgaaacccagagtgacagcatcttctaatcatagagtacacaccactctgggatttttttctttccataccaaacatttaggtacccatgtctcatcagtgacttgaaagctcatttcctgtaacactcagtaataagtatcctgttatctagatatatcaaagttaacttatctgtttacctactatgatggtcagtattgatctccaacctgacagaatcaaaaatcacctaggagacaaacctttgaacatgtttgagggagtttctagactaggtcaaaggaagtggaaaaaggttaaattggagtagtgccttccttgggctggatctctccagagtcagcctacaaagcagatgaaggtcactaaagctgtgctccaagtgggtagcagcacaactcaacagcgttgtccatgcagttcttggtttgtaggaaccctcacaggctcaggccatctgtaaagcaaatgcatgtggttccgtttctcccggaagtcttcagaagttttaacactgcacagaagtgtaagtgaggcacctcttctgatactcaggcagccccttaactgtgagtccctataacatacaaagtaagaccacacttccgactacactgaaacatttcagaaatggggagtggcatgcataacaagggacaatcagaccaaagcaagactgaaacccagcagggaaaaaaaacaaatcctgaaactctgtcactggcatctggagcttctgatggaatcttctgaaatccaaaaggctcgagtgggggctggagagatggctcagtggttaagagcactgactgctcttccaaaggtcctgagttcaaatcccagcaaccacatggtggctcacaaccacccgtaatgagatctgacgccctcttctggtgcatctgaagacagccacagtgtacttagaataataaataaatctttaaagaaaaaaaaaaaaaaaggctcgagtggtcctgcccctccagctctgcacctgcagcacagcaaacctcgcacatggcccagctccatctccagcacactagcactgtcatcgtttccgtgaataaacactgaataaacattagtgtgttgagcaccagcatctctttctgtgcttcctgactgctaacgcagtaagaccagctgccacagcgcccccacccgccctgccatgactgaccgtgctctagaactccaggtgctgaagcatcctgtatcctcaggtatcctgtcatagtaatgagaaaagatctgccaaagatcttgtttgctcccagttttagcaagtgtgaataggaaaagatttattttaaacaaagcttagatattggatattactagggttttttttcttattaaaaaatactcttttgtaggagggtttgtatgtgtgtgagagagacagacagacagacagacagacaggcaannnnnnnnnnnnnnnnnnnnnnnnnnnnnnnnnnnnnnnnnnnnnnnnnnnnnnnnnnnnnnnnnnnnnnnnnnnnnnnnnnnnnnnnnnnnnntagccctggctgtcctggaactcactctctgtaaaccaggctggcctggttattgattgagttatatcaatattcctgcttctcaggtactgtgattaaaggtgtgcaccaccacctcctggatataaaagatactcttaacaccaactttgtatatgccttagtactggaaatcatttaatagttaattaagagaaaaagaaggatccacaaagatagcttagcacgcagacctaataacctgagctcaattcctgggcccacatgaaggtggaagaagagaaactccataaggtattacctgacatcggcgagctatctctctctctctctcacacacacacacacaccagaacagtagtagcaataaaatttaaaattaattgaagaaaagaaactagaagatgtcggtccctcagtcatttgaaaaggagaccatagccaactcttgggtattgaaaaagaacattttcactctttaccctctgagatagttgtcagtttttcaaatggcagtcttacagtcattttggaaataaccttcctatctccagtgttcaacagcacatggcctcaccatgttgtttaccatagcacccttacttgtcctttcaaagctcctgggccagcatgcgaccatatggcatgtttacaaccgtatggcatgtttcgttgtcattcacttttcacctggagtacttcctattgcttctgctttgtgactttgggttttttaagagcatggaccgattacttagtataacgtctatattatctaaccagtgcaaattacacatatttgacagaaatgccgtgtggttatgctatgctttcattaaaagatgcacagctgattccttccagggctgtggtggcttcgcagttagtcagatgctttccaagtttgttttcatttgaagttgactaacaattatttcatacttattaactcttaatcatattttgaagagatactttgagactatataaatatccttttgtcgccgggcgtggtggcacacgcctttaatcccagcactcgggaggcagaggcaggtggatttctgagtttgaggccagcctggtctacaaagtgagttccaggacagccaaggctatacagagaaaccctgtcttgaaaaaacaaaaacaaaaatccttttgtcaaactttcacccactcattttaacattcattatgattcttgctgaattaattatactttgattgtagccaaatggtgatttttaacttagcatttcttctgcatttattaggtgtcattttgctacaattatcttttcacttgtccctttagttaggtcacttaattactgacttactatgacaaaatagattagtgaattatttttatttattatgtatttatgtaaatgtttttactggtttagtaaaccaataggtttattgaggttgggattagttatagaagtctatgaaactctcctgcagtccttgcttactgcatacataacactggggaggggctttctgaatcttcatgtttcgtgaacttcctaagtcttatgaacctccttccactctagcaaggagtcccaattctgatgaaaggctctacaattctctgtgccttcctatggctcatacagtccttctgccttctcttcagtgatagtctttttcccttagaaggagaaatatagatatctgggtagggatttttattttttgattttgttttttttttcatttcttgctgaacgttaagtcattgtaccataacagtagtctctgttttcaacagcttgacaagttatgagatacagtaactattgcccattggaaggagggagaaagagaatgagggagaaaaagagggaggaacagagggagggagagagaggggtgggggagggtttctcccttctctctcaaggctgacagtagtggtactgtgtgagttttggtgtgtgagttaggagcctctgctctcctggctcatctctgatgaacacgttggcctggtgaacctacactcctgctcagagggctcaggaattaaaagtgagccaacacagacattttaggatcctgcgtggctctgttacagctgcactacctcgaagttgctgcactgtgacctcctttttcattcagcgggtttatataatctgttactattgctcatttggtgttcttgtttttccagatttaatctatctctctagtcctttgaacatatttatatctgtggtaatttaaatgaatttcttccaaatgctcctatatgtgaatatttggtctccagttgctagtcctgtttgggagcttgtggaacgtttaggaaaggatagtttttctggggctgtgagatccctctctcctgctttttctccctttttgctttttgcagctgacatgtgatctctttgcttcctggttgataaccagccacacgctcctgttgtcatgccttccccatcattacacatggtgtcccctttggaactactactaactaaaataaaccttctcttccaagttgctgttgtttggggatttataacagcaaaagaaaagtacctgagcatcattctttgagttcttccctttttttttttttttttgatattttctttgtttatcttttaaatgttatcccctttcctggtttcctgttcccagaaaccccctatcccatcctccctccacctgcttctatgaggatgttcctccgcccgcccacccactccaatctccctgccctcagttcccctactctggggcatctatggagccttcataggaccaaggacttctcctcccattgatacatgacaaggccatcctctgctacatatgcagctggagccatgtgtactcctttgttggtggcttagtccctgggagctctggggggtctggttggttcatattgttgttcttcctatggggctgcaaatcccttcagctccttcagtcctttctctaactcctccattggggaccccacactcagtccagtggttggctgtgagcatctacctctgtatttgtcaggctctagcagagcctctcaggagacagctatatcaggcagcatgcacttcttggcatccacaatagcatctgaatttgctaactgtttatgggatgaatccccaggtcagacagtctctggatggcctttccttcagactctgctctatactttatctccatatttgctcctgtgagtattttgttctccttctaagaagaacagaagcacccacactttggtcttccttcttattgagcgtcatgtggtctgtgaattgtatcttgggtattccaaacttttgagctaatatccgcttattagtgagtgcatcctttctggcacagtaagaagttcccagctgacctttcattgtttgttatcattgtttttgcctttcagtgtgtgtccatgagcacatgtgtgtgtatatgcatgtgtgtgtgcgtgtgtgtgtgtgtgtgtgtgtgtgtgtgtgtgtgtctttgtgtgtgcacatgcccctgtggaagccagagggctactgatgggattcagatctcctccttcctcatggttcctgggggataaactcagattgtcaggcttggtagcaggctcctttatccactgaaactgtctttccagcctgcttttagggctttcaactttagaatcagccctctcttcaagtagcgctggtgaattataaagggaaagtgatatttagaagcccatatctggttcttggtagtcttgcttctattagaacttagttgctcttagccctctctgtgactagagaagggaggcagatgtgcatgtgtcacattgtgtgatggctaaagtcacgtcacacaccagtacttcctactgtagaccattaccacagaatttgctccagacttcccttgggtaatttcctctccaactgaatgtagtggcttgaagatgaaagcaggaagatcaggagttcaagatgatccttggttccataaagaatttgaggccaactctgtttatgttttcctcagtaatatttactttatgtagtctactctctaatgatataagaccaccccttcaccttaacccacatctcctaagcataccatctactccagacacaccaactgaactctcaaccagcttaggtcctgggcctacacattgcacttgacttgcattcgtatctacttatgtggtaagttctgatccactggtggagacagaatgccagcttactacaacttctaaaagtatcacaactcctgcaaatgaccccccccccaaaaaaaaaaaaaaaaaaaaaccaagccgggcgtggtggcgcacgcctttaatcccagcactcggaaggcagaggcaggagcatttctgagttcgaggccagcctggtctacaaaagtgagttccaggacagccagggctatacagagaaaccctgtctcgaaagaaaaaaaaacaaaacaacaacaacaaacttaataaaaatgaaacctactacacatgcaccataattgctgaacttgttttatatcaaagttgtctgcaagagcacacaaggtttgttcctgaccctcgggaaacaggtagggatccagagagcaggtatgcacagagcagaagacagcactgtgcctatagatagaggcctgggagggaaggaaacccgccctctcctctgtccctttagaggacctgtagcaggcacaaagtggatggaactctatcagtgggtactaagctaataaccttgatatgtgaactttattatatattttaaggtatttttagatgatatattaaattatgagtataaataaccactgagattgcttttacaaggagttggctatacagagttaataatttttgtttgtttgtctatgtgtcttttactttgaattgtagctaaagaatcttttggcgcaaaaggaaatctggctgctggtgactgacatcactctgcaaacacaggatgaaagggaccactctcttcccaaaaccctgcctgtctatatagccccctcgtgtgtgctgggcccagaggttgtagaagaacttgccttgctggtgtcttataacttactcttcagggacgcttttaaggacaacggtatgccagtgtgtcctgattgcttgggtggtgtgactgcttagtgcctaccctgagactctatcctctttcacaaagcccagcgcaggtctagccctgggatggagaagccatcttaccagccatgggctctcatcgctccttgccaaggccacctgataggagccagcatcctaagttgtagtaaacatggagacactgttgtccactccaggactcttaccagcacctgtgctttcctggagatgacctacagccaccgcctacatgtcccattttataaaacaaaagccagagaatatggtatatgtttaccctgtaacaaagacctataacccaaaacatgggatgctgaggtgggaatatcataagttaaaaaatagcctacatcgccgggcgtggtggcgcatgcctttaatcctaggacttgggaggcagaggcaagcgaatttctgagtttgaggccagcctggtctacagactgagttccaggacagccagggctacacagagaaaccctgtctcgaaaaaccaaaaaaccaaaaaacaaacaagcaaacaaaaaaatagcctacgtcacactgagatgctgtttcaaaataaattagtgaaataataataataataataataataataataataataataataataatacctaggctttagatcaatctatatcttttcttgggatcaaatacttaaacttctttttttcattttatgtaggtattaccttgaataccataaactttacttttttcaattttatctgaatattgtacccttgttctttttcaacttagttcactggggtctttaagatgtatttccttggagacacttacatactagacatgtctgacattagcaacagactagcccctatctatgcctttcttcctacaaagcttgcagtggcttatgaaggaggctggctggaaaatgcatgcttttcttaattgtttaaataatctgaaatgtctccgtggcaggtcagattgtttgtattgaacggacagtcatcctaccccagaaacctctcttgtgtgtaccttctgcttcctgtgacttgcccagcccagtgacactggatgaactgagtgccctcacacctgtcaactccatttgcagtgtgcaaggtaggtggccctctgattggaagcagaatttctaatgtcttacataccatgttattttaaatatactgctaagtttcattgtcggtgttctagatgttggatttagagagacagaataagaagatggccttttattctggacttggagtctatataaggaacatttaaatcaggtacatgcacactcaaacaggtctccagtgaggcagagtgaaatcgaggaaggctccataaaggctggatccttaggcatctgcagtggctcagcaaatgaaggtgtttgcccccaacaatgacctgagttcagtgtccatcatgggcacagtgtaaaaagagggccagttctcacaagctgttctctgtcctgtgcatgtgcgcaagtgcatgcttgtgtgtgtacacgcactatcacgcatgtgtgtgttttcacacacccacataccaaaaataaataaataattatttttaaacacctgaatggcacatcaatgattagggccaagaacaggacctataaagttagccgacaggagagagctggcaagccaatggagaagggtgggtaggcttggatagaaaaagctggagagatagccaactgtcaagagtatagcctgttgtgcacagaagtaggcagcttcggtattgacagagtcacagagataaccatgtatacacagagagagcaccctgtggtgataacatggggagtggttgaagaaactagctttgaagacttaggggtacagtctatattctaccctgaaggtagagagggggccaagagaaaataatgcagtgacagagaactaaatacagggcaagtggagaaccgggtttccctaggaagaacactggtgggttgggtaatgtgtcaggtcaagaggagcatgcatagaaaacaggtgcagccacatgcaagcttccacctcaggccaggaggcacccatggcttgtctgccctaatgaaacttagaatatgaggcgactctgagggcacgcctgtgtcttgcttgaaacgggctatctgcctgttgtgcttcccattgttatttagcatatattaattatacattatagtggatttcattatgacagtgtcatacatatacataaagcattttaatcctattcaccacttactgccttctcttcctccttcatgcccactgattcccttgtttggatgctgttttgtttagaggtagttagttatagttggggtttttttttttttttggtttttttttgttttgttttgttttgttttttaaaatattttttattacatattttcctcaattacatttccaatgctatcccaaaagtcccccataccctcccccccacttccctacccacccattcccatttttttggccctggcgttcccctgtactggggcatataaagtttgtgtgtccaatgggcctctcttttcagtgatggccgactaggccatcttttgatacatatgcagctagagtccagagctttaatatttattttatttttaattatgtgtacttgtatgtgactatggggtctgtgcacgagttgctctcaggagccagagtgttggccccccctgcagctggacctaaagacagttgtgagctgcccagcatgggtgctggaaactgcactcaggacctccccaaggacagtacacactctgaaccattgaaccatctctccagatcactcaattatatttttaataagcttataaagtgctgattttggtgcttttgaagcatgaaacagatgtttcagcagccgcttgtatatattaatccagagatgaaaatcgtatcagtacttctttaactctatgaaaattatttcataataaaagtaataatgtacattggagcagttctactgtatacttgtgctgctgtgcccctgccaccaccacatacagccgtggagggaatgaagtgttgtaggcagggcatctgtctggggagctagaggttcatacaggtgcaggcaggccttcatgggcaagctgctcctctgccagcatatcataggatgtcccagtcctttcttagctatcatttccagtttctgtaaagaagggtttaagggaccaggtctgtgttttgtagccttgagtcttctgacagtcaggagatggaacccagggtcttgctaatacttaccgtgtactggaccatgagctacatctccagccctcatgagcttcattaaaacctttacatgctttatggtttacttattcaaagtgttttaatatgctcacaaaactgtacaagcatcactataaccttggagcaaaaccaacaaaccgaaccgaacaggcttcctcccacacctttaacaagtcatctgtctgctttctgtttctatgaatttgcctgctctggactatttgccattgttggtttgagacaggatctcttgtagcccttgaagccctgaccctctggcctctgcactgggtgtgggtggcagttgcaggcatgcacctccatgctcactttgttttgttgttgtctgtcagacattctcttcagtgtgtctgtgtgagtgcctacacattctgtgtgtcccgcatgcacgcctgggcctgtgacggtgagaagagggtgatgagagtcctggaactggaattgtagcagttgtgagccacctgatactgttgctgagaaccaagcctaggtcttctgcaagatgagcaagtactcataaccagactcatctccccagccattagtcgctgcttttttgaatgaagtttcccactgtgacctaagctatcctgtacctcactgtgtaatccatgctagccttgaacttgaaatcctactggctcagccttctgattccaaaccagcatactcagctgtaaacttacttttattcttatcctcatgtgcatgtgtgtgtgcatttgtacatcatcattgtgatgtgtgcatgcgcatgtagggtgtacacatgtggagatcaattttgtgaagtcaagctctctcctttcgcccttgtgagtgtcgctgtaatggtactcaggtcatcagacttgcaaggcacttaactacattgaggcatctccctggcctgacttgtttttcagatgattaagtgtgttttatgagccaggatatggtcttttgatgtgatttttttctctctgaacataagaatgtattttcctgctcttgcatgaaaacatcagataatgtcagttcagtcctgttgatcagcagagctgtcagtgcagcaccactacctttcttctgctgtatttgtcacagtcaacaggcaggactgttggtttggagatcatactggtgaatttattcttcatacaagttccatctctttttacatgtattttcttaaattttgttttgtttttggtcttactgacctagaactctctaagtagacaattctagccttgagagctgcctgtgtctgcccctaggtgctgggattagagcacaccccttcctaggtgctggggttagagcacaccccttcctgcatgctgggattagagcacaccccttcctgcatgctgggattagagcacaccccttcctgcatgctgggattagagcacaccccttcctgcatgctgggattagagcacaccccttcctgcatgctgggattagagcacaccccttcctgcatgctgggattagagcacaccccttcctaggtgctgggattagagcacaccccttcctaggtgctgggattagagcacaccccttcccgggtgctgggattagagcacaccccttcctgggttctgggattagagcacaccccttcctgggtgctgggattagagcacaccccttcccgggtgctgggattagagcacaccccttcctgggttctgggattagagcacaccccttcctgggtgctgggattagagcacaccccttcccgggtgctgggattagagcacaccccttcctaggtgctgagattagagcacaccccttcctgggtgctgggattagagcacactcctggcttgacatgtattttgatacattgttgagtgcatacacattaatgaaatgaccttattgtttttacttaataattatttctagtcccaataattttcagtactctgaggtttgccctgtctgaaattaaaattatggcagcatcccctcacaatttagcattgtggctgctttgtttttaatttgtatagtaagatcagtcatattaagaattactgctataattgattgatacacattttttaagtgtattgctcttggatccttttatttattttttccactcgtttttatgtgtgctttgttttattttgttttgtttttatttgcattgagcgttcagtgtattctgatttccttcagtatttcaatttaagacttaaaatcttacatgaacatggtactgtatgtcaaattaagcacagagtgaaattcatcataaaaattaaagtaaaatattttagaagtgaactagtggttgccctggagtttctggtatatacttaacaaaactcacgtcagctctcaggtggcactgtggtcctgtttcctgtgagaatattactagccaagcatggtggttcatgcttagagtctgcatttgagaggcagacattaaaattgccctaatagagagcaacctggtccacattagctagttgcaagcttgtgagcacacccagttacatcactactatttgcttgtgagcacactcagttatatcactactatttgcttgtgagcacacccagttacttcactactgtttctttaacctgctcttaaggtgtaagtattgaatacatgattgttattgtcatttctttaaaaaactattaaatcaacagtagcttatttggcagtttagactttcactgatgatatttttcctacagacctacatttctgacatgttccttccatctcaacattctctactggcattcacaagtgggtttcctctgtttcctgttctattattacccaccttactcacttgagacagggtgtttactgaacctgaagccaagaagcccaagtggccctcctgtctctgtcgctgtaggtcacatgcatccatgcctgcctttttttaatgagtgctagagatttgctattactttctcctgtttgcacaatgaacacttttaccctccgagccatctctccagccctctaactacatgtactaatttatttgtttgtttgtttgtttgtttggttggttggttggttggttgttttttgagacaaggtttgtatagccctgactattctgcaactcattctgtagactaggatggctttgaactcaagaactcaaagatctgcctgtttctgcctcccaagtgctgggattaaatcagtgtgctaccatacccagctatatattcctaatgacaataacgaagtaaaccagaaaaaaatgatatttaataaaaggaattaaccaacagtatatctacttatctcttcctatgaaagaaatagcacaaagacaggcagtttcagaggccacgatactggtcagtgatgaatttggcctttcttcctactgggcttaggtactgtggttgatgtagatgagagcactgctttctcgtggcctgtgtgtgaccggtgtggcaatgggagactggaacagaagccagaagatgggtaaggatgcctgaaacccctggggccctaaggacacggcagtaacccagcgccaggtcctacaatcttgtaccctatatgtgggctccccaaacccggaagggaacccactctgctgagctgcagcatagaggctgtgatgctgctttgtgggttctcctaatggccgtaaaatgtagaattgtgatttgtccttagtgccttcattattagaagaaaaaaactgaataggtaagacaagctgcatggcatatcctaggactttcccaggggacagagcagtggcatggcatgttctaggagtcctgcagactttcccagcggacagtgagcagctttcagtagacacccctttctgtccacttatgttaccctcctgggctaagatcaaggctaaatagttgtcttcattatagcttctttgcttctgtaatgagacacagtgaccaaaaccaagttggggagaaaagggtttatttggcttatacataacactccatcattggaggaagtcaggacaggaactcaagcaggacaagaatgtggaggcaagaactgatgcagtgaccatggaggggtgctgcttactggcttaccctccatggtttgctcagcttgcctttttatagaacccagagcagggatggtaccattatcaatggacttggccctttctcatcaatcactaatgaagaaaatgccttactgcctacagctggatcttaggaggcattctccttgattgaggctctaacctttcagatgactctggtttttatcaagttgtcctaaaattctccagcagagtgttggtgccatttgtttcactggagtgactctctgcctcccagtggacgttgtcatatgacagaccaaaatgtgtcatcattacttgtttgtttcttagaatcaaagaacaaggactggagagatggctcagcagttacaagaactggctactcttccagagaacccacttggcagctcacaagttgtctatgactttacttccaagggatccaatgcccttttctggtttcttcaagtaccaggagtgtacatgatggacagaattcatacagacaaaatatccatatacgtaaatataagttttttaaaagaagcaaaaagtcaatatcttcctgatgcctagggttattgtccttgtgagtacacaagtgatttctggactatgtcaaagaagcaagggaacatgggtgtatgtgaaagcagtgtgggagtgaggacaccagggctgatgagcaagcctgacctgccagcagggtgggaaattcactcccctgacctccttgaagatttggccttcacttcctgggaggctaccttcccccatattcctcatgaataatgcctctgtgtacccaaggcccgccctcagcagcctccaactgctaagccatcagaagaatcccagttcctggctgcttttgactgattccaacaatctaattctgacagcaaaatttctctcactgaatgtttagagaacactctttgctgtagaactcttctgatacctatctccctggttgcttatatccctatgtgccttctcacaacagaggcaccttctcctgtggggactgttcccaactggtcctgtcacctcttcaagagaggcacctgcatgtctttctggactgtcccacgagacctgagagtactgtgaaggtcaaggtaggaaaaggagcctggagctcatgtttgtggtcaggaaagatgaggctgcagtggggctactggtgtgcttgttcttttgttcacctgtggcaaagtgtgtgagccagttagatgtggaaagagctccttggttcttgggagaagcagggggtcgcctaccccagtttgtctatacagtgtcctgcttaacttaagcctccaagacttgttctctacagaggaggccgacagcttagattcagtgttcgtcttcagataggaataccttaggtgagtacttgtcatttagtggaatatcactgagcccttctttcctgttgctgcagctattggagagcagtatttctttacttctgatgtctgctgcctctgaggatggggtgagtacagggcccagcctgagtgtgccctttgttcttgaatctgtgtgaggttgtccctgaaggaagaccccattgctgtatctgttcattaaaacagatcctatcataacaccacaagtcacttatgtgttaaaacatatccactttgacactgccactcacccatgtacaacagcagggccagagacgttcctctctggaaattaaagatgctgaaaatcttccttcttggcttctgatatagtcatacagcccggtggccagagtcctttctcatgcttcccagtcacaaaacaaaattgctaaagacatactttttattacatttatttatttgtttatttgtatatttattaatgagtgtgtgtgtgtgtgtgtgtgtgtgtgtgtgtgtgtgtgtgtgtgtatcagtatgtacatgccataatacacaagtagatgtttgagaacaacttgtaggaatcaggtctctcttgccctgtgggtcccagaggttgattggactcaggtcatcaggcctgatgaccagcaagcacctgtacacgccaagccatcttactggccctgtggcacactttttagtttttactgagggtctggactctgaatgcctgaattattattgttatttctcagagctttggtcttacataccttgaaaattactatagcaaaacttagtaaactgtggcatgtgtctccaagaaaagaattctgaaagttgatccttagagcagtacttctgtcctttgaaatggcacttacctggtaaaagtcacttaaggacactgcagggggctgggtgtgtagctcagtggatggagcacctgactaacatgcaccaggcctcagaccaaaagttcaagatcactcttaactacatagctggtttgaagctagcagcccttggctacatgagacgctgtctgtaaataaatgcactgtaggtagctcatggaatcaataaccccaaactaatgctaaggctgtcagagatgaagctggaaactgcataaataagctgtaagggttattggtctgagctgtggttctcagccctgacttcacacggtgccacagtttctgtccccctggtacaaagcacaccagctttaaagctctttggtggccttgacctctgacctggcactttcacctgagctgtggctgacactatcactgtttctgaatagaagagtcatgctttgacaccaagttagaagacacagaagttggtactttcttattatgtaaaagcctttagttaccatggcctaagaaccaagcccattgcattgctgacacatggtcctcactgtcgccatctccatgagggactcaacacaaaggcatctcaccaaggtagctttatctctgccgaaaggaacagttggtagttggaatcagggaattaaagaactcacagtatttaaaggcaggcagggagcagtgtctgttggctgacataagctaagagaacgggtgacgttggaccagacactggtgagccagagcttttcagtgtgacatatgtgctcaggtggatgctttaaaaaggtggatgggggtaggggggtggggagggggctggagatgggtaagagcaccgaatgctctttcaaaggctctgagttcaattcccagcaaccacatggtggctcacaaccatctgtaatgggatctgatgccctcttctgttgtgtttgaagagagcaatggtgtacttatttatatacataaaataaataaatctttaaaaaagaaaaaaaaaaaaggtgggtcgggttttctacgaacacatactctgtggagacagttgggggaaagcatggggagtcctgcttggatgaataacaaaatgaacccaacctccctacataagcaaacttaagactcacagccatcaacagccacactctgatccatgtgcatagaggctggtatctgccttctgactcagtggccaccacagcactgatggggcctctgtagataatgtctctatggggacctggacaccaggaacactggcagaaatcctccctcctttcattcctgttggctgaggtatcttgtttctgcaacacacttaacttcttcaaccagaatgctctggttactgaaaacctgttgatcgagctttaaaaaggcatgtgagcatgtattcctatgtgtagaagtacaggtgtgcatgtacccgtatatgagcctccttggacactggctgtactgtgtgtgtgtgtgtgtgtgtgtgtgtgtatgtatgcatgtgtgtgtctttgtgcaggagtgcatgcacttctatatgaggaatctacttggacactggctgtacatacatatacatttaccttacatacatgtgcacagatattaagtaaaatgacaaagggaggtcatagctgttggtgtcacctttgtaggtgctctagtttcctagtccacactagtgggacaaaggagccatccaagcttggagcacagtttagcaagctctttacactgcccttacctctgttaacagtaactacaagcaggactttccctctgacctggggtggagcctaacagaagatagcagtcaaaggcctatgtgcagacacagcagcaagtcacacactctggatctgtgggtcttctgggtgagaattcacatccacaaaatccagagaatcaaattaggggtctccataaaaaccatactccattcctggagcaaatatgctgtttctggttgagataacttggtattaaaatgtatgtgtttactttggccacactgtgaatgtaaaagcaatgggattaactgttgttcttgctgtttcttactggttacattacagtgatgtagggttgaaatctgttccttcaactttcagaaaaggcacacatatattgtatcaaaaaaaaaaaaaaagaaaagaaaagaaaaaagaaaaaaaggccaggcatggtggcacacgcctttaatcccagcacttgggaggcagaagcaggctgatttctgattttgaggccagcctggtctacagagtgagtttccaggacagccagggctatacagagaaacnnnnnnnnnnnnnnnnnnnnnnnnnnnnnnnnnnnnnnnnnnnnnnnnnnnnnnnnnnnnnnnnnnnnnnnnnnnnnnnnnnnnnnnnnnnnnnnnnnnnnnnnnnnnnnnnnnnnnnnnnnnnnnnnnnnnnnnnnnnnnnnnnnnnnnnnnnnnnnnnnnnnnnnnnnnnnnnnnnnnnnnnnngtgcatggattgctggtattgatgttttaaattcaccatgttgatttttttatttgtttgtttttgttttttggggttttttttgtttttggttttttgagacagggtttctctgtgtagccctggctgtcctggaactcactctgtagaccaggctggcctcgaactcagaaatccgcctgcctctgccgcctgagtgctgggattaaaggcgtgcgccaccatgcctggccacatgttgatttatgagtataaaacatccatatgatttatgagtataaaacatgggtttaaggtccactcctaggtgatagagctaaacctaacattttacaatgaaaggatttttcacagatgtttatgaaatcccaattacatacttttaagctgggtgtggtatctcacacctataaccccagcacctgaggggtaaggcaggagaatcaggaactcaaggttgtcctcagctatatagcaagctttaggttagcctgagctacatcccatgggagcttgactcaaaagaaacgaaaaaaatccatcctctttccagagaagaccatggggatgctgggatcatcgctttcgtgcttacacagcattggttaaggaaaatagtaagaggcactgaagttcttagctgtccctcctctgtcgttctcctgccaattctcctaatgatgacctggtcctagcactctctccagatctcactgtcaagcaaactgtgagcttgccattcacacagtgaacctgcagagaagcacctgcgaagtatccagtcttcctctctggaccagcagttctcatttttccatgaggctattgaaccacagtgtagaccttgtttatttgcaaagtattaagtaagctacgttggaaaatcgagtcagtatatgtcatgctcacatcccaactgatcctgacgatgactctgcaaaacaaagcacccagcacactccacacaggcattctctatacagtccactctgggcttcattggcatggttcatctctgccccactgggcatcaactggtaccctcaagacaaggctgtagccacagaagcctgcccagccagggctgttggcccaacttcctcacaggccctgactgggctggccaactttcctaactgagcttaagacatctctatgtcccttccactgcactatgtcccagacctaaatttgagaacatagtcggtacgtctagcccagacctgggatcaaactctggtcacgggtagataccctaggaacccaaagctgtgctagctacattctctgccctctccagctgtccagctccttggccgtagctgacctgagttccttgtcagctgccccgtccagaggacaggctatagtgcccattgcagtcctctctaggctggccatcacttctgcagtctcctcaaatttgcatttttatttttagccctacactcactgaaaatactctgcagttagatccataaaagcctagccagggcacagccacaccagggacagatgctgctgcccagtacctgtgtctgtgtctggaggtgaaaatctcccaagattaactatgtggataaaacctccagtcacattactagagcacaaacagaaatgtttaccccaatgtaactcaagaagaaatggaatctaattgaagagggaagtctggggcaagcaccaggaaatcctttggccacaagtgttgctagattggggaagtgtccccaaaggaagtgggagacatatgcaagccaaaagcccagcccccatggaagagcagtacttcctctgcatattgtcttccaaatcctgtcctaggccagtttatccaggcagccactaaaaactgccagactcaattatcataataaagtagtttattttgctctgataaaggggatttttataatccacataccccaactcccaccccaaagccttttccgttggaaggaaggctgcagcttatgaaaggaaggacctttgtcctggctgtggcatcgttgttgggaacaaaatgtccaggaacccagggctgtttgctttaaccagaatgcttctatcactgcagagttatgaagtggagagcgtccttgggaaggagatgggacctttactctgctttgtccagtccatcactacacagcagagcagctgtgtcgtcaccctggaagagattgagctgctgagtacagagggagccactgctgctcagcctcctccctgacatctgtgcgcttggcaaggggctgtgtgttaactcagtgtttctgtttttaaatttagtgggtttcttttctttcttttttctggtaaagagattaataggatagttttaaattaaaaatcaagatacctctaatacacatttttttaaactttaccttcctacaagtttgataacatgtttctttgagtgtttctcatgtcttctgtgtcttcattttgcagctacttgggcttaggaaatgtgctttgttgtagctttaaagtagttacaatttatcaatattatatatgttttttctttgcagtatctaatattctctgctagattgttctgtaaagcttcagccagtatctcatattgaaatattactgttctgttacaataaataaatgtccaacctaaacactttgtggttttagtgttctgggagctgccagaggtggcactgtcacccatacaatgttgggtgtgaggagagctgtataaaagagaaatttctgtaccttactccactgcccacctgtcagagaccctgaagaactgcagagggcaaagatcacagactcacagcagtccacaagcctgcactttgggcagggatttgaattacaaacaaagctatgtatttagaccctggagggtttgtgttttctgtacaacaggccgtgcagatcagggaaggggttggaacaaccagtatcttagtagaaaggcacatagctttggggggggggggggttaa

SEQ ID NO: 3301 - DNA, 3586 bp, Mus musculus
cggatggggcggcgagcaggaagactgtgcacgtaggagatgtctggagcccgccgccccggcacgtccaagaggaaaaggaattggcatatagaacacccatcctttcgagaagagaggtcacagcagttgagacggggaaatttcaagacagtggaagcagctgactctctctctaaagcatggctcaagtgtggagaaggatttcaggacacctctgagatcctgtcattagcaagtgaaaagacaggtattactgaaaagcacctggaattatctccaaaaccaaagacagaaactacaagtaagaatgctagtgagcttccaaatataatatggagttccagtgaaagtgatttctccgatgaagataagacacttcctgcattacagagagatggtaggcatggccctagagccgacaggcttggtgacaggactatctcatgtcccgaagacgaagacattgaagatgaattacaggttattgactgggaggttaacagtgacaaagaagatcctggtgggcctagtgagtgtgaagatgataagggtaccctggacatctcagattgtgattcctgtgcaagtctgacaagtgatgacaggctatgtgagccttctgagccaatttctacagaaattttggagtattcatcagatagtgaaaaagaagaagacccagaacattccctgttcattgattcagaatcccctcacaaataccaggcggattttaaatctgatgcaagatggtgtttggttagtcagactgactcagaagcaaattcagctgagcctacattgacaccccagaaatatacggtcaagtttccgaagactccagaatattcagtaacaaagaagaagcttttaaggggcgggctagcagaaagactccaagaactgcagaatcgaaagagatctgccatttctttgtggagacatcgatgtgtttcttaccaaatgacaccattaggcagaaaatctggtgtattaactgtgaaaattctagaactgcatgaggaatgcagcatgcaagttgcagtatgtgagcagttagcagggcctccaatcaccagccctcccggaggactagctcctagaccaggagcctacctgaaggtactcttcaccagagagactgcagaccacttgatggggcatccccaggacatcatttacatcttccctccttggcaaaaacttcttatcccaaatggaagttgctccattattctgaatacttatttttgtcagaaagctattgcaaaagaaacagtgcgcgaagacctatacagtccggacatatctctttcaaggagaaatataactttggcccagacatttagaattaaggacataacagacaattcatccatcaatcagactacatatgatagcctggccacccctggcacaggctggacccacggacatgagaaggcagagcaacatcttatagttgctgctcccctgaggaattctcttctggacattgtggaaagccaaagagctggcctatggtctggagtcagggtccaagtagtagtgcagagggtgtactctcttctcagcagagatggtgccaggagccagcaagggcacacagtgggacatgcagatgcctctggagcatggtcctgccttctagtgcaggatgcctgtggcatgttcggggaagtgttcttgaacagcaccctctggaagagcagacagttagaagggaagtcctgcagcatgtcgggagtgaaggttctacagaaagctacaagaggaaggacaccagggctcttcagtttaattgacagtttgtggcccccagtgatatctctgactgagccttcctgtggccagcccagtggagagacaaagacttatctgcctcctcctatcttctgttatatcttctctgcacatccaacactgggacaaattgatgcaattgaagaccacatttccaagctttaccagcctccagttgtccgctgcttaaaagaaatcctccagactaatgagtgcagtacacgttgcagcttctatgccagagtgatttatcaaaaaccacagctaaagaatcttttggcgcaaaaggaaatctggctgctggtgactgacatcactctgcaaacacaggatgaaagggaccactctcttcccaaaaccctgcctgtctatatagccccctcgtgtgtgctgggcccagaggttgtagaagaacttgccttgctggtgtcttataacttactcttcagggacgcttttaaggacaacggtcagattgtttgtattgaacggacagtcatcctaccccagaaacctctcttgtgtgtaccttctgcttcctgtgacttgcccagcccagtgacactggatgaactgagtgccctcacacctgtcaactccatttgcagtgtgcaaggtactgtggttgatgtagatgagagcactgctttctcgtggcctgtgtgtgaccggtgtggcaatgggagactggaacagaagccagaagatggaggcaccttctcctgtggggactgttcccaactggtcctgtcacctcttcaagagaggcacctgcatgtctttctggactgtcccacgagacctgagagtactgtgaaggtcaagctattggagagcagtatttctttacttctgatgtctgctgcctctgaggatgggagttatgaagtggagagcgtccttgggaaggagatgggacctttactctgctttgtccagtccatcactacacagcagagcagctgtgtcgtcaccctggaagagattgagctgctgagtacagagggagccactgctgctcagcctcctccctgacatctgtgcgcttggcaaggggctgtgtgttaactcagtgtttctgtttttaaatttagtgggtttcttttctttcttttttctggtaaagagattaataggatagttttaaattaaaaatcaagatacctctaatacacatttttttaaactttaccttcctacaagtttgataacatgtttctttgagtgtttctcatgtcttctgtgtcttcattttgcagctacttgggcttaggaaatgtgctttgttgtagctttaaagtagttacaatttatcaatattatatatgttttttctttgcagtatctaatattctctgctagattgttctgtaaagcttcagccagtatctcatattgaaatattactgttctgttacaataaataaatgtccaacctaaacactttgtggttttagtgttctgggagctgccagaggtggcactgtcacccatacaatgttgggtgtgaggagagctgtataaaagagaaatttctgtaccttactccactgcccacctgtcagagaccctgaagaactgcagagggcaaagatcacagactcacagcagtccacaagcctgcactttgggcagggatttgaattacaaacaaagctatgtatttagaccctggagggtttgtgttttctgtacaacaggccgtgcagatcagggaaggggttggaacaaccagtatcttagtagaaaggcacatagctttggggggggggggggttaa

SEQ ID NO: 3302 - protein, 923 aa, Mus musculus
MSGARRPGTSKRKRNWHIEHPSFREERSQQLRRGNFKTVEAADSLSKAWLKCGEGFQDTSEILSLASEKTGITEKHLELSPKPKTETTSKNASELPNIIWSSSESDFSDEDKTLPALQRDGRHGPRADRLGDRTISCPEDEDIEDELQVIDWEVNSDKEDPGGPSECEDDKGTLDISDCDSCASLTSDDRLCEPSEPISTEIYSSDSEKEEDPEHSLFIDSESPHKYQADFKSDARWCLVSQTDSEANSAEPTLTPQKYTVKFPKTPEYSVTKKKLLRGGLAERLQELQNRKRSAISLWRHRCVSYQMTPLGRKSGVLTVKILHEECSMQVAVCEQLAGPPITSPPGGLAPRPGAYLKVLFTRETADHLMGHPQDIIYIFPPWQKLLIPNGSCSIILNTYFCQKAIAKETVREDKPDISLSRRNITLAQTFRIKDITDNSSINQTTYDSLATPGTGWTHGHEKAEQHLIVAAPLRNSLLDIVESQRAGLWSGVRVQVVVQRVYSLLSRDGARSQQGHTVGHADASGAWSCLLVQDACGMFGEVFLNSTLWKSRQLEGKSCSMSGVKVLQKATRGRTPGLFSLIDSLWPPVISLTEPSCGQPSGETKTYLPPPIFCYIFSAHPTLGQIDAIEDHKLYQPPVVRCLKEILQTNECSTRCSFYARVIYQKPQLKNLLAQKEIWLLVTDITLQTQDERDHSLPKTLPVYIAPSCVLGPEVVEELALLVSYNLLFRDAFKDNGQIVCIERTVILPQKPLLCVPSASCDLPSPVTLDELSALTPVNSICSVQGTVVDVDESTAFSWPVCDRCGNGRLEQKPEDGGTFSCGDCSQLVLSPLQERHLHVFLDCPWESTVKVKLLESSISLLLMSAASEDGSYEVESVLGKEMGPLLCFVQSITTQQSSCVVTLEEIELLSTEGATAAQPPP

SEQ ID NO: 3303 - DNA, 483207 bp, Homo sapiens
  misc_feature (1)...(483207): n = A, C, G, or T/U
cagaccttgcttttgttcaggctctcagcctgttattcacagcctccataatatctgtgtcttattcctttacagctttgctcattatttatcttataggtaaactagactactgcgtcactgtacttgcttgccccttggtggtaattgcgtatgttcttggtttggaataatgccagttctcccatttctgctgattgaaaccttttttttttgagacgcagtctcgctctgtcgcccaggctggagtgcagtggcgcgatctcggtacaggcgccagcctccacaccgggctaattttttttaaatttttattagagacagggtttcaccgtgttagccaggatggtctcgatctcctgacgtcgtgatccgcccgcctcggcctcccaaagtgctgggattacaggcgtgagccactgcgcccggccatgaaatcttaatcatccattgaggcctacttcaaatcccaccttctcccaaattatcccagctataaatgaactttcttctgtatgttcttggtttggaataatgccagttctcccatttctgctgattggaatcttagtcatccattgaggcccaccccaaatttcacctcccaaattatcccagctgtaaatgaactttcttctgtagtctgtggaattttatgtaaataactcttactattccatgtcttacattaggtttatttgtgtctacacctttattcccttatattctagacatttaagattagggactatttcttcagcccatattccccagaatacctgtcatatcccttgtatgtactagatatctgatgaattaatgaaaggagaactagtttagaagatttgcaagtattccaggtgtgaagaaacaggaggaaataccctagtccgaagactcggatatctgcctcagcagtacagctgaatgattttgcagttttggacaagccacacagatatatcacgactcttaagatgaaaggtggtgtggttatggactaaggtggtggaattaggaatagaatagaaaggactgggttgacagactacaaatggaaggtgagatttaggcaactgcaattgaaagaggaagaggaggaaacccatggtgattcagaaagtcgaacctatgagaagtgagaaagttgtttgcctcttaactgatgttaggatatatagatatatcctatatatcacatatatagatatgtggtatttaagtcccagggagattagggcagtcagttgctcaaaggctggggtatcttagttctttcctcactcccctctcctccatgagtttctcctgccctagcccctcactatcccttaacatgctgtgattcttccctttgtgccttgtgttctccctttccttatgaagtagccaaggacgaccacatatactcctgttcttgggcagcagcttgccttttgagattttctttttttttttttgagatggagtcttgctcagccacccaggctggagtgcagtggcccgatctcggctcactgcaaccactgtctcctgggttcaagttctctgaatagggcaatatacctaacattgagttgtcgtttctttataaaatggggttaatacctatattgctgggttgatgtgaggattaaattatgagaatgcatgcgatgatataccgagcatataaacactcaataaatgttggtgataatgaaagcaattaataatgaaacaccatgataattaaagaaatcatatgaggacaaagatattgtacatcctctactgctttgtctctagatttccctggaattgctgtctttcagcttcttgaacaagaaataggaaaaaggctcattttcaagtttttcagtgatggcaggaaattctcatagttatcttggtaggagtacctcatggttccagtttaaggccttgatagtctcattgaatgatttactggtggctctacatctcagaattagactacttagtattgacatctcagttgtctttttttttttttttttttttgagacagtcttactctgtcgcccaggctggggtgcaggggtgctatcatggctcactgcagtcttgagctcctgggctcaagtgatcctcccatttcggcctcctgagtagctgggaccacaggccatgccactgtgcctggctaatatttaaatttattttgtagagatagagtcttgctgtgttgccgaggctggtctcgaattcctgacctcaagccgttctttctccttggcctcccaaagtgctggggttacagcgtgaaccactgtgcctggcctagaggttgtcttattcctcaaaccaaagggaaagagaggaaagagagcttttattgaaagctttctatatgtcaagcactttgcatagagtacctcatttaagggaaaacatgttttctttttagtcaaaataatacatgttcataggtaaggtaaaatagtacaaaaaaagtttgttgtaaaactcagcagtcccttgcacatctcattccatttatttttattgagataactgtaaattcacagacaattgtgagtaatatagagaataattgttttataaactaaatctggaggctgggccttgctagatcaaagtgttgacagatttcatgtctggtgagggcctgctttctggttcacagacagccatattcttaccatgtctttatatggtggaagaggtaaaggagctctccaaggtctcttttataagggcatcaatcccgtaacttctaatcacctgccaaaggccccacctcctaataccatcaggtgatctgcccgcatcgacatcccaaagtgctgggatgacaggcgtgagccaccatgcccggtctgaagtttttttttttttaatacaacataaaactctcatgatttatcgaagttgttgtgcatatcagtagtttctttgtcttttttttttttttttttgagttggagtctcactctcttgcccaggctggagtgcaatagcgcgatctcggctcactgcaactttccgcctccccagttcaaacaattctcctgcgtcagcctcccaagtagctggtactacaggcacctgctgccatgcctggctaatcttttgtattttagtagagacagggtttcaccgtgttgcccaggctggtcttgaactcctgagctcaggcaatgcaatccacccacctcggcctctcaaagtgttaggattacaggcatgagccactgtgcctggccaatagtttctttgttttaattgctgagtagtgttccatataatggatataccagagtttggattaacatttattattgaaggacctctaggctgttttcaggttttggttattgcaaataaaactgctataaacatttgtgtacaggtttttgtgtgaacataagttttcatttctctgagataaatgcctaagtatgtaattgccagaacctatggtaatttgatgtttaactctataagaaactgacaaacttttccaaagtggttatatctgtataattttgcagtcccattggcaatgttggtattcagttttatagataataaaatctacccttttaaagtggaaaatccagtggtttctagtatatttacagagttgtacaaatgttcctaattgtagaatattttcatgaccccaaaaagaaaccccatagctattactagtcagtcactccccattctctcttccctcatccattggcaaccactaagctactttcggtgtgtatggatttgcctattctggacatttcatataaagtgtggtcattttgtgactggcttctttcattaaaaataatgttttccaggtttatacatgttgttgcatgtatcagtacttcattcctatttattttgaataaattttttattgcatggacatactgcatttgaaaaatccatttattagttgatagacatttggattatttccacctttgggctgttaagaataatgttgctttgaacttttttttttaattgagatccggtctcattatattgcccaggctggtctcaaactcctggctgggctcaagagatcctcccatctcagcttctcaaggtgttgggattacatccgtgagccatcgcacctggcctgcgttgaacatttgtatatgcatttttatgtagacctaagtttttctttctctagcagtggaatttttgggtcacataataactgtatgtttacattttggataactgttagaattttccaaagtggttgcaccttttacagtctcaccagcaaggaatgaacattctaattttgccacattcttgctaacacttgccattgcctgtcttttacttttagtcatcctaatggttatgaagtgttacctcactgtgatttggtttgcagttccctaatgagattgagcatcttttcatgtacttattgggcatttctgtatcttcttgaagaaatgtttattcagcttatttggctgcgttttcattgggttatttgctgttttattgtggaatcacgagttctttaaaattctgtatactgttcccctataagatgtatgattgcagatattttctctcattctttgggttttcttttcattttcttattgaagtacaaatgtttttaataattttgatgaggtccaatttgttttttcttttgtttcttgtgcttttcggtgtcatgtctaataaatcattgcctaaaccaaggtcacaaagatttattcctatgttttcttccaagagttacagttttagctcttacatttaggtctgtgattcatttggagttaatttttctacacactgtgaggtaggggtacaacttcattcttttcgatgtggatacccagttgtttcaacactgtttgttgaaaaaattgttctttctccttgaattgtcttggcacttttttgttttaattgaaaatcagttgaccataaaagtaaaggtttgtttctggtctatgaattctattccactgatctccatgtctgcctttattctagtaccatactgttttaattactgtaacttggcagtgttgaaattagaagtgtgagtttctgacttgttttctgttttgagatttttttaactgttttgggttcattacatttccatatgaataatagcagcttgtcaatttctgcagaaagccatctgggattttgattttgttgaatatatagacaaattggagagtattatcatcttaacaatattatttcccatgagcatgggttgtcttttcatttatttagatcttctttaatttctatctatgttttacagttttcagtgaaaaagtcctgcacttctttggttaaatttattcctaagagttttattctttttgatgctattttgaatgcagttctactggcacatgctgctgcacgtggctaatattttttgttaattttttggtagagatggagtctcgctgtgttgcccaggctggtctcaaattcctgggctcaagggatgctcctgttttggcctcccaaagctctgggattataggcatgagccagccgcacccagctccattgatttttttaaatattgagattgatcctgcaactttgctgaactcatttattggttctaataattttttgggttttctgaagtgtggattccttaagatttcctgtgtacaaggtcatgcagctannnnnnnnnnnnnnnnnnnnnnnnnnnnnnnnnnnnnnnnnnnnnnnnnnnnnnnnnnnnnnnnnnnnnnnnnnnnnnnnnnnnnnnnnnnnnnnnnnnnnnnnnnnnnnnnnnnnnnnnnnnnnnnnnnnnnnnnnnnnnnnnnnnnnnnnnnnnnnnnnnnnnnnnnnnnnnnnnnnnnnnnnnnnnnnnnnnnnnnnnnnnnnnnnnnnnnnnnagtgagaccatctttttttccccccaagacagaatcttgcgctgtcacccaggctggagtgcagtggtccatctcagctcgctgcaacctctgcctcctgggttcaagctattcttctgcctcagcctcctgagtagttgggattagaggcgtgtgccaccatgcctggctaatttttgtatttttagtagaaacgggctttcaccatgttggccgggctggtattgaactcctgacctcatgatccgcccaccttggcctcccaaagttctgggattacaggcgtgagccactacacctggccaaccatgtctcttaaaaaaaaaaaaaaaaagaaagaaaacaaaataccatgctgtctgtcagtagagatgaatttactacttccaatttagacatcttttatttcttctccttgccatggctagaacctccagtcaaatattgaatgtaagtgggaagagttgacatcctttctttttccttcttttagggataaagcatccagtatttaactattctgtatgatgttagctgtgggttctttgtatatacatttttatcaggttgaggaaataaccttctatagctagtttgttgagtttttactgtggaatagttgttggcctttgtcagttgcttttcctacatctaattgagacaatactgtggtttttatcctttattttgttaatatatgacattgattgaattttcaatattacattaactttgtattcctgggaaaaatctctcttggttatggggtataactctttgtatatgttgctggattcagtttgctagtattttgttgaggatttttgcatctatattcataaacagttttgctctgtgcttcgttgttatgttttggttttatcagggtaatactggtttcatggtgtgaattaggaagtatttcctcttctgtattttggaagagtttgtgaaggatagatactgtttcttaaaatgtttggtataaatcaccgttgtactctgagcctcagcttttctttgtaggaagttttaaagttatgactcaatctctttgtttgttacagctctctgatcagttttttatttctgagtcggttttgctagtttgtctttctcggaatttgttcattttattttagttatttaatttgttggtatgtagttcatattatttccttataatgttctctgtaatcttttgggtttctgcaaaattggtagtgcttcctcactttcttctattcctgagttttgtagtttaaatcttctcttccccgcccccaaacctccttggtcagcctagcttgtcaattttgttgatctttttgaggaactaacttttttttttatattctttgttgtttttctattctctctgtcatttatttctgccagatggaagttttattgactaaagatttttcttctttttaaatgtagtcatttacagctacagatttctcagtaagtactgctttagctgcatctataggttttagtgtatattgttttcattccttttaaagttatcttctaattttctcatgatttctttttttgatctattggctgtttaggagtgtgtttaatttttgcatacttgtgaattttcattttatttttattgtaaggtttaaatttcattctattattgtctaagaacagtattactatgatttcactccttttaaatttatcgaagcttgagttatggcctaacatggtctgtcggagaatgtttcatgtttacattagaataatgtgtattctgctgttcctcagggtaggggggtgtcttcatggtttctgtcaagaatgcagctgttaacacttattgaggatcctttgtatatgatgagttttgtacatgacgtatattttcttttgctactttcatagttttttctctgtttttcaccagttgacatggtatgtttagggtggatctctttagattttatgctatttggagtttttaagcttcttggttgtatgtttcattaaattgaggaagcattttgggctttgtttcttcaaatattctttttacctctgtctctccttccttctgagactcttattatgcatatatttgtgtgtctgatggtgtcccacaggtctctgaggctctgttcatttttctttacactctttttttcctgtttctcagcttggataatctcatttgtctgatttaaagtttgtgaattcctttttttgccaggccaaatctgctgttgagctcctctggtgcattcttcatttcagttactatagttttcaactcctgaatttctgtttggttctgtctttttataatttctgtgtctttattgatattcgctatttggtgaggcatttttataattttcttcactttttggatatagtttcctttatttctttgaatatatttatagtaagtgatttaaagtcattgtctagtgagtccaacttctggctcctctcagggacattttcttttgactacattttttccttatcatgctttcctgtttcttcatgtgtgttataattattattattttttgagacagagtctcaccacgatgcccaggctggagtgcaatgacatgatctcagctcactgcagcctccacctcccgggttcaagctattcacctgcctcagcctcctgcctcagcctcctgagtagctgggattacaagcaggcaccaccacgctgggctaatttttgtatttttttttctttttttgagatggagtctctctctgttgctcaggctgtagtgcaatggcacgatctcggttcactgcaacttctgcctcctgggttcaagcgagtctcagcctcctgagtagctgggattacaggtgcgcgccaccacacccggctagtttttgtatttttagtgagatgagctttcaccatgttggccaggctggtcttgaactcgtggcctcgggtgatacacctgccttggcctcccaaagtgctggggttataggcatgagccacgtcgcctggcctataatttttgcttgaaaactggacgttttaaatagtatgatttgaagtaattcatattaatttctggatattaaattctcccatcccctccccagggtttctgtttgttgttggtgctataattttgtttaatgattttcctggatgaatttaataaagtttgtgttgcctgtcgtgtgtagctaatgaagacattatgtggttagtttagttgtctgtggattattggatagagattaccctaaatgctttgagccagtaagtctgtcatcttttacggagggactctgttgagacatatgctttggcaatttgtaatgccagtttaaccttcatttcctccttgggcagcgcctcgagatgatccagagttcagaggttagggcctttttcagttttttcctgggcacgtgcgtagtgatgcagggttttttgctccttagttcagctaaaatctgggttcttatctcacgattaggagaaattaggcatgcggacacattgaaaggtgaggacagcagtatttatgaaatcccaaagtgctgggattataggcatgagccaccatgcccattttagttttcttaatggcttctttaggtattataatatacatatgtaacttaccacagtctacatatgcaacattttaccacttcaaatgagttacagaaacttgacttttcacttaggtacccataaaaaggaaaaacaaactgttttcccctcttctctcatgcttaacacagtacacttctatgcccagatgtgtggggtgttttatcctgacaccaagcatccagtagacaccaagtgggtatcctataatttaatccaattttgatgctctctacctggagatggtgtgagatcacgcaggttcagggctcagtcccacgagactggccccacttcagaggtcaattgcaagtagtaggttgtcactcatatttttgatcaattgaatataaatagggattcccaaaccttcctccttaggttcgattaatttgctatgttggctcacataagtaagggaaatacttacctttactgattttttataaaggtattcagtagaagcagatgaacagccagatgaagagatggatagagcaagacatggacattataaaggaattcaatagaagcacatgaacggccagatgaagagatggatagagtaagacatgaacaggttgagggcaggtggcgtgcttgaagcttccacgccctctctgggcgaaccaccctcccagtacctctgtatgttcagcaactgagaagctcatcgaatcttgttaaagagttgttttttttttttaattgttcatttttttttttgagatacagtcttgctctgtcacccaggctggagtgcagtagcttgaccttgacttaccgcagctttgacctcccaggctcaggttatcctcctaccgcagcctcctgagcagctgggaccacaggttcatgccaccacatctggctaatttttgtattttttgtagaaatgaggtcttgctgtgttgcacaggctggtctcaaattcaggctcaagagatcctccatcctcgacctccctaagtgttgggattaaaggagtaagccatggttctggctgttaaagtgtttttataaagcttgatctccagcctcctcctttctcagaggttactgagtggagctgaaaataccaacccactaatcctctaatcacttggcctttttgctaagtgaccccattctcaagttatctaggggccccaccctaagtgacctcagtaggataaacttaggagttatcaaaggaattctttataaataacaaaagatattcctatcacttaggaaattgcaagagttgtaggagttctatggcaggaacctgggataatgaccagatatatttcatgttatagcacagtatctttaccttccctatttaaaaatactgtattgtcaaatgattttacaattttttcttcaatcattgattatgatttatttataaagttcatgaggaacatttttgttgcaccagagtaaataattgctacatattttcctttgcattgttctccatctccctgtacttaaatttttaaattctatgttcattactagtcagataagatgtcttctttccttctcgttgagatacattctccagtatcttcctaataaaggaatcacgagaagtaaaattgtaaagttcctgcacgttttaaaaatatcttttattttttccccttgattgatagtttggccgggaatagaagtctagattggaattcagttttcctcagaattttttttttttttcccgagatggagtctcgctctatcacccatgctagagtccagttgcgcgattttggctcactgcaacctccgcctcctgggttcaagcaattttctgcctcagcctcctgagtagctgtgattacaggcaccgcgaccacacccggctaatttttgtatttttagtagagacgggttttcaccagattggccaggctggccttgaactcctgaccttgtgatccacccacctcagcctcccaaagtgctgggattacaggcatgagccaccgcgcccggcctagaacagttttaaacaattgttctcattactaatcataaaaataatacacagctattgtggagctgctagaaaataaagactacaatagaaaatacccccataggcccagcgcggnnnnnnnnnnnnnnnnnnnnnnnnnnnnnnnnnnnnnnnnnnnnnnnnnnnnnnnnnnnnnnnnnnnnnnnnnnnnnnnnnnnnnnnnnnnnnnnnnnnnnnnnnggtgaaacccggtctctactgaaatacaaaaaattagccgggcgtggtggggggcgcctgtagtcccagctacttgggaggctgaggcaggagaatggtgtgaacccgggaggtggagcttgcagtgagcccagattgcgccactgcactccagcctgggggagagagcgagactcagtctcaaaaaaaaaagaaaaaagaaaatatcccccataaatctataaaacctataatcagcataacataagcattttgataatataagcatttggatctgtttcctgcccgtttttatacaactgcttatatatatttaaaaatttgtacattattttttttaaatttaatgtcattagttttacatgggtgtgttgtttgaaaaataggtaagaataatattttccattctgataaaatcaaaagcagattatgtattcttatgtgtaaataagatttccattggcgttgcatatattttttagtttccattcttaaaatgagtggaacctctgtgtaaagaaaatattttattattttaaataaaagcagaatacaacactgtctattttacagttataactggaagataatgtctaatcagaagactctaatagggtaggaaaacattaaaatagttatgtcacgttggtagctgggtaccccatacgtaattttgtatttagtaaatatttttggaatgtggatgaatagaccatgatgacttttttctatttatttttttaaattttctgtgcgtgtgttttttgtttttgtttttgttttttgttggtttgtttgagactggaacttatttctgttgccccagctggagtgcagtggtgcgatcacagctcactgcagcctgggtctcctgtgctcaagcaatcctcttgcctcagacccctgagtagctgggactacaggaacacgccaccaggcctggctaatttttgtatttcttttttagacagatggagttttgccatgttccccaggctggtctcaaactccggggctcaagtgatctgcctgcgttggcctcccaaagtgctggggttacaggcatgagccaccatgccttgcctgttataatgttaagagaataaataaggtgtaatttctgtaaatatttagacacacatgaataatttatttgaaagttacctgtccagtttgtatagctctagatatattctgtacttgttaaatgctatgaccaaagaaaagcagtatacaatatcgcttgtccaagtgctagtttatttatggaaaaaagcgaaacctactttgtgcctgagttttgtatgtacttttaccaagatcttgaaaatatttctctttgtacattaccctgtaagaacttccttatttcaaaccagtttattgaatttcatgttcagttgtcatttacatattattaaaatgtaggtaacaaatatacttgtacatctataatgtggacaaatacagtaaccaaggggaaacaaaataaaaaactgaagaaaaaaataatcaaagggaaaacaattttgatggaaaggctagtaaagaatttgcagtggttggaaaaataaataagatattcaaatggataactctataaggctgctggagaagggagtgagcaagctagatggcgtcaaggtgagggagagatttttatggtgtgtagtgttagagacttgaacatgattgaatggtggacttaatgatagaactggttaaagtggaggggattggaatcctgattgctgtgtctcatgatcagcaccctcttcttctgttcaggatttcctttttacagcttcaaaccactggaatgtaaggcattatgagtttcttcctcagccttttttttttttttttttcgagacagagtttcactcttgtttcccaggctggagtgcaatggcacaatcttggctcaccgcaactgccgcctcccaggttcaagcgattctcctgcctcagcctcccgagtagctgggattacaggcatgcgccaccacgcctggctaattttgtatttttagtagagacggggtttctccatgttggtcaggctggtctcgaactcccgatctcaggtgatctgtccaccttggcctcccaaagtgctgggattacaggcgtgagccaccgcgcctggccctgttttagttttgggtatataccgagcagtggcattgctagatcttggtggttttattttattttattttaatttatgttatgtttgttatgttatgttatgttatgttatgttatgttatgttatgttattttagagacagagtcttgctgtgttgcccaggcttcagaactgtggcgtgattatagcttactgcagcctcaaactcctgggctcaagcgattgtctcgcttcagcctcctgagtagctgggaccacagatgaacattcccacccctgctaatttttttttttttagggacttgctatgtttcccagactggtcttgaactcctgggctcaagtagtcctcctgccttggtctcctaaagtgctgggattacaggtgtgacccattgtgccctaccctgtgtttaacctcttttttttttttttttttttttgagacagagtctcgccttgttgcccaggctggagtgcaagtggctcaaacttggctcactgcaacctccgcctcctgggttcaagcaattctcctgcctcagcctcccgagtagctgggactacaggcgcacaccaccattcccggctaattttttgcatttttggtagagataggttttcaccatgttggtcaggctggtcttaactcctgactttgtgattcgcccgccttggcctcccagagtgctgggattacaggcatgagccaccgtgcccagctgtgtttaacttttgaggctctaccaaataatttttaacaactgcaacgttttacttttccaccagccatgcacaaaagttataattgctacacatccttggcagtgcttgtcattttctttctcttttttttttttttttttattaatagccattctggtgggtgtgaagtggcatatcattgtagtttcttgctttttgttcttggagataggatctcactctgccactgaggctggaattcagtggcacaatcagtgatgcagccttgaccttccaggctcaagtgatcctcccaccccagcctcttgaatagctgggactataggcacatgccaccacacccagctattttttttttttttcaaagacaggatcttgctctgtcacccaggctggaatgcagtggtgcaatcatggctcactgcagccttgacctcctgggctcaagcaatcctcctaccacagcctcccaagttgctggaactacaggcacatgccaccatgcctggctaattctaaaaaaaatttgtagacatggggtctcacgacgttgcctaggctgctgactaatttttctaaggacagtaatcacatttgtggggcctctggtttcatgttctagtcacctccaaaggcctcatctctttttttttgagatagagtcttgctctgtcaccaggctggagtgcagtggcaggctctcggctcattgcaacctttgccttccggggtcaagcgattgtcctgccccagcttcctgagtagctaggactacaggtgcatgccaccacgcctagctaattgtttttccctaataataattatacggcatttagcttttataccttcctgttgcttatttttatgtctgtgtcttctgaaatgatagaaggaagcaggattcaggatagcttttatttttctttttttaaggacgtggcctctcactgtgttgcccggcttgaagtgcagtggtgcagtcagctcactgcagcctcaaactcctgggctcaagcgatcctcctggttcagcctcctgagtagctggaactacagtcgtgtgccaccatgcccagctcactaaaaagttttttttttttttttagaaatggggtcttgctatgttgcccaggctggtcttgaacctctgggctcatggaatcctcctgccttggcctcccaaagtgttgggattacaggtgtgagccatggcacccggcccagcatagcttttataccttgtgttgttttcatgggtcttgtaaaaatatggccacttgtgtatttgtcttgtagattctccctgactctgctcatctggaccttttctgtgtgtctgccacccctgtgctgctgagtggattccacttccagtactttctcagtgacgggtccagaagggagtccagggtgaccagtttcaggggcccaggnnnnnnnnnnnnnnnnnnnnnnnnnnnnnnnnnnnnnnnnnnnnnnnnnnnnnnnnnnnnnnnnnnnnnnnnnnnnnnnnnnnnnnnnnnnnnnnnnnnnnnnnnnnnnnnnnnnnnnnnnnnnnnnnnnnnnnnnnnnnnnnnnnnnnnnnnnnnnnnnnnnnnnnnnnnnnnnnnnnnnnnnnnnnnnnnnnnnnnnnnnnnnnnnnnnnnnnnnnnnnnnnnnnnnnnnnnnnnnnnnnnnnnnnnnnnnnnnnnnnnnnnnnnnnnnnnnnnnnnnnnnnnnnnnnnnnnnnnnnnnnnnnnnnnnnnnnnnnnnnnnnnnnnnnnnnnnnnnnnnnnnnnnnnnnnnnnnnnnnnnnnnnnnnnnnnnnnnnnnnnnnnnnnnnnnnnnnnnnnnnnnnnnnnnnnnnnnnnnnnnnnnnnnnnnnnnnnnnnnnnnnnnnnnnnnnnatggctcggtgtggagaagggtttcagaacacttctgggaatccggtaaagtatctgtagaattgttttccctgaatgccaaagaggaaatcctgagtgttcagaacattgtaattacatttcattgtaattccctttcttattctttcagaacactgtaactggtacactccttttcttgcctttcattccttgaattcctttaataattgtggcaagttagtaagttagtattcacctttttattttttattttttttttattttatttatttatttattttttttggagacagagtctcactttgttgcccaggctggagtacagtggcgcaatcatagctcatggcatccttcaggctatcttgcctcagcgtgtcaaatagctgggactacaggtatgtgccgccgtgcctggctaattttttttttttttttggagacggagtctcactttgtcacccaggctggagtgcagtgaggctatgttggctcgctgcaacctccgcctcccgggttcaagcaattctcctgcctcagcctctcgaatagcttggattacaggtgcgtgccaccacactcggctgatttttgtattttttgtagagactgggtttcaccatgttggccaggctggtttggaactcctgacctcaggtaatccacccaccttggcctccaaagtgctgggattacaggcgtgagccactgtgcccggctgcctggctaatttttaaaaatctttctgtagagacagggtcttgctgtgttgcctaggctggtctctaacccctggctgcaagtgatcctcccacctccgcctcccagagtgccgggattataggtgtgagcccccatgcccagctcacacctgaacctctttaatccatgcagaacctttctacttctttgtttgtaaatgaaggatatttactaagaatgttctcagaagatgaaaccattgagcatactactcttcacaagaaatgcatgtttactctggaggcgtactctggagatattgcaggtttggttcaggaccaacacaataaagtgaatattgcaataaagtgatcacatgaattctttggtttcccagtgcctataaaagttatgtttatattataatgtagtctgttaagtgcaatagtattatgtctaaaaaagcaatgtatataccctaatttaaaaatactttgttgctaaaaaaaatgctaacaatcataggagccttcaccaaggtataatctttttgctgggggagagtcttgccttgatgctgatggctgctgactgatcagatggttggtggttgaagattggggtggctgtggcagtttcctaaaataaggcaaaagtgaagtttaccacatctatttactattcctttcatgaaagattactgagtagcgtgtgatgctggtaacatttgaccagtaatagaacttctttcaaaattggactcaatccttccaaagcctgacactgctttatcaactaagtttataggatattctaaattacttgttatcacttcaacaatgttcacagcattttcaccaggagtagattttatctccagaaactactttatttgttcattggtaagaagtaactcttcatccattcaactcgtaggaaattgcagcaattcagtcatatcttcaggttctacttctaattctagttctcttgctgtttctatcacatcagtttttctgctgaagtcttgaacccctcagtcatgcacaagggttggaatcaacttcttccaaactcctgttaatgctgtattttgaccttctgtcatgaatcatgaatgttcctaatggcacatagaatggtgaatatttttctgaaagttttcagtttactttgcccagatccatcagaggagtcactatctgtggcagctacagccatatgacatgtatttctgaaataataagatttgaaagtcagaatcaccccatgatccatagtctgcagaatggaagtggtgttagcaggtatgaaaacagcattcatctccttgtacttctccatcatagctcttgggtgaccaggtgcattgtcaatcagcagtaatagtttgaaagaaatctttttcttctgagcagatctcaacagtgggcttaaagtattacagtaaagaatgctgtaaagagatgtgctgtcatccaggctttgttgttacatttatagagcacaggcagagtagatttatcataagggcgctaggattttcagaatgatacatgagcattggcttcaacttaatgttaccagttgcattagcccctaatatgagtatcagtctgttctttgaagctttgatgccaagcattgacttctctctagctacgaaagtcttaaagggcatcatcttctaatataaggctctttcatctatattgaaagtctgttttttagcgtagctaccttcatcagtgatcttaactagatcttctggatcacttcctgcattaccttgtacttttatgttatggagatgatttcttaaacttcatgaaccaacctctgctagcttcagacttttcttctccagcttcttcacctctctcagccttcatagaattgaagagagttaggaccttgctctggattctgctctggcttaagggaatgttatagctgattcaattttctatccagattgctaaaactttctattagcaataatgctgtcttactttcttatcatttgtgtattcactggagtagcactttcaatttcgttcaagagcttccctttgtattcacaactggcttaacggtttggctcaagaggtctagcttttagcctatcttagtttttgtcatgccttcctacctaagcttaatcatttccagcttcttttttctttttctttttttttttgagagggagtctgtctctgtcgctcggggtggagtgcaatggtgcgatattggctcactgcaacctccacctcccaggttcaggtgattctcctgcctcagcctcccgagtagctgggattacaggtgcccgccaccacgcccagctaatttttgtatttttggtagagatggggtttcaccatgtgggtcaggctggtctcgaactcctgatctcaggtgatttacttgcgtcggcctcccagagttctgggattacaggcgtgagccactgtgctcggccatttccagcttttgatttaaggtgtgagacattcagctcttcctttgcttgagcactttgaggcgattgtaaggttattaaattgacttaattttaatattggtgtgttgcagagaataggaggcctaaggagaaggcaagagatggaggaacagctggttggtggagcagtcagaacacacacagcatttattaattttgctctcttatattggttttgactgtggcaccccaaatcagttacagtagtaataccagagatcactgatcacagaccatcatagcagatttaataataatggtaaagtttgaaatcttggaataattatcaaaatatgacacagagacacaagtttataggtgagcagatgctgttggaaaaatggcatacagaattgcttgacacaggattgccagaaattttcaatttgtaaaaaaatgctttatctatgaagcacaataaaacaaggtatgcctttatattcagaatcttttggcaatgagatattctggataatttttgtgtttgtggtaacttacagagtaatgctattacaaattcaagataatttgggtatgagtagtaatgagtacctcataggcagttggagtcacatgtatgagcagatattacactgaatgttaatgggaaacgttttggtcagtcagatctctttagattcaggaaaaatagaatgaatttataaatatataaggagtacatgctttgggaatactgaaattggtgaattggtaaaggaaatcagagaagaatatgttaaggagagtgtagtttaagattttgaatattttataaaagtttttttttagcatttgtcacataaattccatgattattattttgcctacagtcattaacagctgaagagaagacgattacagaaaagcaccttgaattatgccctagacccaagcaaggtaactattttgttgatttcttgacagagaagatataagactaataaatccttctgtgattattttaaaaatttgctgttttaaaaaagtgacatggtttgggtagactatattcatagttaaaaaacatcaagataaggtaaaaagatatttttgagaactttgtctgtcatcgctgtcaccgtctaccccatttctcctgcctgcctacagataactaacattttttgtgtgtccttcctaagttcatttttatcacagagcccagtaggttagctcatgctcatagctccagggttttgtttgtttgtttgtttgtttgtttgtttttaatctgatttgggaaagaaatgtgacctatgccataagaactatactgcttcaggctctgaaattctttcttgatgaattagggaactttcaataagtagtagaaaactctgttcaaacactagagtatttgaataaatgaggttgaatttgtctcctgcagcaggacatccacagggctagattctttctgaattctgtagcctgagtgtggaattggttctcatggtcaggaggtgttggctgaattccacaggctgaattcttggaagagtgtaggtgctgaggattttcgccaagtcagctttgcctttcctttgggaaggaatgcgcttcccagtacctctacctttgactagaacctgttacaaacggtcacctccactaaagatactttagtgaaattaaggatttttagataggtatgttgctgctaaagaaaactggggttattagtaatgaagaaggggtggatatcaggtaggccgctggttctcctgccataggcagtcagccccgctgtgggtgtgtaggaagagtgagggcttgtgacttccgggatcttgctgtgtcctggctctctaatctttgaaaactaagctaaacattcgcagtctgttttgtatctggagaatgggcataatcattgggttatcatgaatattaagtgagctaaaaatagtagattaaatgcctaattaaaggtgcttcagtaggtacttgattgatgacagcagttgctcatatgtctgatgacagaaggagctatgtgaaagcctattcagagttctacagagtgaactaacttcctgtgacattctaaaccatgttactatttcaagtgacatggaagaggttctatgcaaatgaaaaataaaatttgccaaaatgtttctttaaaatttataaagtgttgctttatgaagtaaactagtacacatcttttaaattctataatcttctgatggaattgcagaagctgttggcagagacaagcctctgaccttaggcacacattacaaaagcatgttcctgattctgcttcccagctgtcataaaaatactacttcctcacccaaaatgtagtatagaatttttatcttggaatttttgttaataggatgtcttaaactaatacttcagtatctgttctagacctctctccttggcttgtagatgattgccttcttcctctctctcttccccaggtctcttcacattgtcttctctgtgcatgtctgtctttgtgtccagatttcaccttataaggatttcagtcatcttggattaaggcccaccctaatgaccttatttgaatttgattacctctttgaagaccatgtcttcaaataaagtcacattctgaggtacagaaggttaggacttcaacatttgaattttggtggggggggacacagttcagctcataacaccaggtgctaggacagtgcctagcacacagtgggcacccagaaatgttcagtgtggctaatatttatcctacggttccattggaatgagccttgatatcaaggacaccctctttacagcaagtgaaatgagttactaatcaattcctggtagtgattttaactacctagttgtgcagtcaggtgcctataattcatgggtttataaatctagagtcctggtctctgaggttttgaatgacataactaatgattatcctgtcttttaaattagatggtacagaagcaccagacagttacatattttcttagatactcacactaaactaatggtgaaagcaactgcaggtctctctgacttgagagctacgcataatggttaagaacatggactcagaagctcacctgcctgggtgtgcgtctcaggcaccacagctgctggctgaaaaaaggcattacatttgggaagtcctttccaatgaatgactcataacatagaaactgtatgaataaagctggtaaattcacctaaacataaagggaaaaacagcatggccaaaattacatatataagtctgatagggtggcatacgtctgtagtcccagttacttgggaggctgtggcaggaagatcacttgagcccaggagtttggggctgcagtgtgctgtgatcatgcctgtgtacagctgctgcagtccatcctgggtgacatagcaagaccacatcgcttacaaaaaattacatgtacatacacaaaatttaaaattcagaaaaaccagggaaaatactgtggctcatgtcacagaccaaggctgatctttctaataaagaaccatcagaacttaatctagggggaaaaagataactattgcaaaaataacgattatggaggaactgctttcaaaaaaggaaatataaatgattttcaaacctatgaaaagatgctcagcctcaaggcagtgagaggtcatttttttctgatcagatcatccagaatcttagtatatatctttctgtttgttctttcatgttcttttgaagtcttctaaaaacatgtactttggttttacatgtctcttaagtattgggggaacccgcccccaatatttcaacgtaggttctttgtattttccctaagtgtcggccagctgagaaataaagagaaagagtacaaggagaggaattttacagctgggcctccaggggtgacatcacataacagtaggaccgtgatgcccacctgagccacaaaaccagcaggtttttattaaggacttcaaaaggggagggggtgtacgaacagggagtaggtcacaaagatcacatgcttcaaagggcaaaaaggagaacaaagatcacatgcttctgaggccaataaagatcacaaggcaaagggcaaagcaaagatcacaaggcaaagggcaaagcaaagatcacaaggcaaagggcgaaatcaaaaactcctgataagggtctatgttcagctgtgcacatattgtcttgataaacatcttaaacaacagaaaacagggttggagagcagagaactggtctgacctcaaattcaccagggtggattttttttccccaccctaataaacctgagggtactgcaggagaccagggtgtatttcagttcttatcccaaccgcataagacagacactcccagagtggccgtttatagacctccccccaggaatgcattccttccccagggtattaattattaatattccttgctgggaaaagaatttagcaatatcttccctacttgcatgtccgtttataggctctctgcaagaagaaaaatatggctgtattctgcctgaccccaaaggccatcagaccttatggttgttttcccttgttccctgaaaatcgctgttattctgttctttttcaaggtgcactgatttcatattgttcaaacacacattttacaatcaatttgtacagtttaacacgatagtggtcctgaggtgatgtacattctcagtttatgaagataacaggattaagagagtaaagacaggcataagaaattataaaagtattatttggggaatgataaaggtccatattaaaatgaaatcttcacaatttatgttcagagattgaagtaaagaacttgtaaaagtattaattttgggaactgatatatgtccatattaaaatgaaatctacataatttatgttcctctgcggtggctccagctcgtccctctgttcggggtccctgacttcctgcaacacttaagtttcttgtaggtattttattggtttttgctactgctttaaatttgatttctgtattgtagtttgtaccttgccacctttattggacttccttattaacggtagtaatttttcagttggtttcttgacttttccatgaattcatttcataatttgcaaatagtgataacttccttcttttttttttttgagataatgtctcactctgtcacccaggctagagtacagtggtgtgatctctgctcactgcaacctctgcctcctgggttcaagcaattctctgcctcagtctcccgagtagctgggattacaggtgcccacaaccatgcctggctaattttttgtatttttagtagagatggggtttcaccatcttggccaggctggtcttgaacttctgacctcgtgatccacccacctcggcctcccgaagtctaggattacaggcgtgagccaccgctccctgctgataacttccttcttgacttatttttcagatgcataataatgatagagattgataatgtcttttgcaagtactcagtttattttattagctatttagatagatatagattcttagaatattctgaatagtttatttttccttttataacgtgaacaataggccacttcagtaattctagatgtttgtggcacaaagtagtaagtgttcagtaaatgttgactattccatgtttttgtgcctttgtaagtactgttttttcagacatcatcttgtcagtgaatcctcttttcctgatcgatgcaaagtggaacattccattttttttgtgccaccattattccatgacatacatctggtatattgttagtttttttcatgattagtgtttcttccagaccacacatattccttgtgggaaggagctttcttttcttttcttttttagagatgggatcttaccctgtcactcgggatggagtgctgtggtgcagtcatagctcactgcagcctcaaacatttgctcttaaactcgtcctcctgcttcagactcccaagtagctgggactacaggcatgtaccactgtgcccagctaattttttaactttttgtagagattgggtctcactgtgttgcctaggctggagttttttttgtttcctcatggtttactgtatcagaggggttctgtaaatatgtatctaatgaagcctaggtttattttttgtaaaacatgaattttataaatatctaatctcttaatttcatagtgtattaaaatgtgctttgaaatatatcaaataccatactgcataggataagatatatatgtacatatatatgttttagcattatatttacaattatgaatataaacagaataattgatttttattaggtatatattccttttctgaccaatatcagaaaagtttgctgttgacttttgattctgccaagatgaaatagccccattctgtcaggttttccacctatcagaatggctacaatgaaaaatagtgacaatacaaaatgctggtgaggttgtggagagactggatcaccagtacattgcaggtgtgtagtaaaatggtacagccactctggagaacagtctggcagtttcttaaagactaaacatgcaattaccatataacccagcaagtgcacccttaggcatttgtcccagagaatgaaaattaaattcacataacatcttatacacagatgttcataagcagctttgttcataatagccccaaactagaaacaacacagatgtctttcagtaggtgaatgattaaacaaactatggtgcatagtaccatggtgtactattcagtaataaaaagaaaataaatgttgatacacacaacttagatgaatatctaggaaattattctgagtgaaaaaagccaattctaaaaagttacatagtgattttatttatataacctttttgtgtgtgtgtgtgtgagatggagtttcactcttgttgcccaggctggagtgcagtggctcgatctcagctcactgcaacctctgcctcctgggttcaagcgattctcctgcctcagccccccctgagtagctgggattacaggcacccgcaaccacgcctggctaattttttgtatttttagtagagacagggtttcaccatgttggccaggctggtctcgattatataacatttttaaaatgacaaaattacagaaatgcaaaactgagtagtggttgacagagttcagggattggtatggggccaggagatggtgtagctataaaaaggtaataaaggcatcctgtggtgatagaattgatctgtatcttgactggatcagtgtcagtatcctggttgtgttatactacagttttgcaagatattaccattggagggactgggtgaaggatacaagagttttctcttatttcttacaactatatatgaatctaatattatctcaaaataaaaagtttaattaaatacaaggtttggtcttaagtgttttaagcaccctgctaccagagctcttagcatggcaaaggaagcacacagaagcattcctgttactcataagttttgactttgtgttttgcattttaaaaaattttttgttttcatcaaataccccagaaagttatacttttataaatgttatttcaagtcttatttttccggttttcatttgtgctctagtcactttcctttttttgtataacttaaccagttctacttctttttcttcttggaacttggcttcgaactcagagaatgttagtgagattgtacgtagaactttaggtaggaagatttgacatagacattgcttttcctatcacagagttttgtgtatttgtgactttggcaaaattacatgcataaaattgtattctgataaatgaccatataaggagatcatatttatgtgctttcttttccttcaacagaaaccaccacatctaaaagcaccagtgggcttacagacataacatggagctccagtggaagtgatttgtcggatgaagataagacactttctcagttacagagaggtaatggacattgctctagaatagacagattttgtaacaggaacatattgtgtccagaagatcagagtaatgaaggtaaattgataattttgttaggaatccagtttctgttaaatattggatttaatattggaagaaacttacattcctttctagtatttatcattaacattccacctatcagaatggctacaataaaaagtagtgacagtacaaaatgctggtgaggttgtggagaaactggatcaccagtacattgcaggtgtacagtaaaatggtatagccactctggaaaacagtctggcggtttcttaaagactaaacatgcaattaccatatagcccagcaactgcacctttaggcatttgtcccagagaatgaaaattaaattcctttctaatagttaggattttactgagtcccaccctctatgctaaacacttcagaaacattttcttgtttaatatttctcaaaacaactctaagaaactctaagagataggtattacagatattatttttacagttaacaacttaagcttggactgatgagaatggattgggattccattttaggtctctgctccatagccagttctttcaacgtctacacagtgccacacccacactgccttcttcccaacctgttcggtaaatactgtgacaaccagtgtgtggtagaggtgtaacgtactgacaaatttctattcagatggcgttttatattgtgtcatgttttagacaattgaaagcagagtttctcatccttgacactcttgacattttgggccagatgattctttgctatggggagtaacaccttcctatgcctgtaggatattctgccgtgtcccttgcctttacctgccgggtcacagtagaatcccagccacagtgatgataaccaaagatgtctccagatgttgtcaagggtcccatgaaggacaaaaatcacccctagttgataaccacagatgttgaattatggaaatcatgtccttttagaatttttaaaatatacaaatcatctatagagtatttcagtgtcttaatgttttcaaaataagcttatgacttttaactcttgacggttcatgttagttacctagggttcagtttgtacagacagcttctcgggagggtagttaaattcttttgaccactttgtatttcattttggtaactattaatatcattgaccttttagtagttaccaggtgaagtggtattttaagattgtatataagctgatagcagttctattattgattcaaccatattaaatgaaatttattgttacttggtttgtcttcatacatttcagaatacaaagtttataaaaatgggtaaatagtatggtttgtgcctcccaaagtgctgggattacacatgtgagctgtcgcgcccagcctcccttccatttggtttttaccaattgtctaaaagtttttataacttttggaaaatctcttaaattattgtagacccaatttcctcatctgtaaaatgcaaatttaagtgtaatagtagcagtcttcctgctttttaaaagttttgtgaccacaaaagttttgtgacgaaagccccagttatttcatagcatgcatcacattgcaatatgtattaatttgtgggctacttcaggctaggaatggtgctgttttctctattgtatttattttgtattgtgagtatctcgaatggtgtgatgggctctttttaggcatttgctttgtctaatgaatgaaggagtgaatgaatgaatgagtgctgcacagatgtgtgataccggcagcggctctgagggcacttgtgtttttcccttgtctctccctggcttcctgttgagaaggttcagcaacctggaaaatctctaatgtgttcccctgcctggcttccgtgactaaatttgatgttaatgtgggaagccgttgccattatgcatctgcttctctcagtggtggtctgaccttcggtctgttatgatcattatagtggctgttttttttaagagatgaggtcatgctctgtcacccaggctggagtgcagtggatcatagctcaccgcagtttcaaactcctgggctcgagcgatcctactacatcctcttaattatgtttagtgaaaaagtctagctgtgtaagaaaggaggaaaaaaataacaatacatagtttatttgcttaaacatgctggagaaactctacaaagatacagaaacacctaataaaagtagttaacttaaaattggggttgggataagatttgggagaaacagtgatttgagataagagtagaaatatacttttcactgtctaaattttttttgagacagagtctcgttctgttgcccaggctggagttcagtggcaagatctcggctcactacaacctccacctctcgggttcaagcgattctggtgcctcagccacctgagtagctgggactataggtgtgtgccaccgtgtccagctaattttttgtatttttaatagagacagcatttcatcttgttggccaggctagtcttgaactgctgagttttggcattctgcccaccctggcctcccaaagcgctaggattacaggcatgagctattgtgcctggccctaaatatattttttaaaattattgagtgacatggatatattaactgctaagaataaaagagatataaaagtgaaagattaaggagataattaagcaagttaaaaattatattttttagatgaattacagtttatcgactgggagattgacagtgacagggcagaggctagtgactgtgatgaatttgaagatgacgagggtgctgtggaaatctcagactgtgcttcttgtgcaagtaatcagtctttgacaagtgatgagaagctgtcggagcttcccaaggtaagaatgaagtatttcaaaacttttattcactttataacatttgctaatcatagttgtcatttttttttttgttttttttttcctgtccttcctcgagaacaaccacttttgactcttaggggattcttttgttctttactcacttatctctaaataacatgcttgtgctgtacttctcaacatggataaatattgatctcacttctctttcacttcccaccctcactgcacaccgaatgttttttatcctgctattcttccagtgcagatatatcaaagtgctggaattgcacatgtcagccaccatacctgggcaaaaagatacaaatttaaatcagctgtcttccacgagtcctctcccagtggagtcacacagtatatgcttaattcttccagcaaaatgtttagacaacatgtgtgaagtgttatgtaccagggaactcattagagactcagtgcccagggtttgtattaggggctagtaacataggcaccctctccctagaaggttcagcagtggactaggaggatacacaggacttagcatatagtcgtactcgtggccatcgtttattacactgaaaggatagaaatctatttttatttatttatttagagacagggtcttgctgtgtcacccaggctagaacgcaatggtgcgatcgtagctcactgtagccttgatctcctgggctcaagtgatcctctcacctcagcctccagagtagctggtcctacaggcatgtgccaccacgtctggctaattgttgtattttttgtatgttaactcttttctgcatgtatgtgagtttgtagttttcatcacatttggtaagtttttggcttttacttcttaattttttttctgactccccttttcgtttcctcctgtgactccaattacatgtatattaattaggctgcttagtgttgcgtcatgtctcatttttgctgtcattgttttttccccttcatttcattttgggtggtttctgttgctacatcttctagtttaataactttttaaaaattcttcagtatattctgcagctaatactatccagtgtattggtcatctctgacattgtatttttcatttctggaagtttgatgtgagtctttatattgtccatgtcttttcttaacatgacatactttcttctatattttgaacatacagagtatatttataatagctgtttttaatggctgttttggtaaatctgtctgtgtcatttctgtgtctatttgtcctccttatgagttgtatttttctgcttttttgcatgcctataaattttaaaaaattgtaaaatacaatgcactattattatagtcttcattctgtgtattagattactaaagcatattacttctgtctaaatgaaattttgtatcctttagtcagcatcttccctttctccatccacttttctctcccagcctctggtaatcaacattctaccacaattctgtgagttctacttttttagattccccatgtaagtaagatcatgctgtatttgtctttgtgtgcctggcttatctgagttaacgtaatgtcctccaggttcattcatgttgcaaatgatagaatttccttctttatcaagactggatagtattccattggtgtatatatactatatttactttatgcattcgtctagacacctagattgcttccaaatcttagctattgtgaatagcactgcagttaacatgggagtgcagatatttttttagcatactgatttcaatcctttggcccagaagtgggattactagattatatggtagttctatttttagttttttgagagaccttcatactgttctccataatagctgtgataatttacattcccaccaacaatgtacaagttccctttttgctacacactcaccaacgcttgttatctttcatctttttgatagtctttctaacaggtgtgaggtgatccctcattgtggctttaatctgcatttccctggtgagtggtgatgatgagcattttaatatatatctgttggccatttgtacatcttttgagcaatgtttaggtcctctgcacatttttaaattgggttctttgttttcttgctattgagttgagttctttgtctattttagatattagcgccttatcagatatgtagtttgtagatattttctctcaatccatggcacatcttttgctctgttgtttctttgctgtgtataatcttttcagttagatgcaatctcatatgtttttgcttttgttgtcagtgcttttagggtaatatttaagaaatctttgcccagaccagtgttatggagcattttccctatgttttatttcagtagctttacagtttcaggttttatgtttaagtcattagtccatttttagttgattttggtgtatggtgtgagataagggtctaatttctttcttttgcatgtggttaacctgttttcccagcacaatttattgaggattgtcctctttccattgtatattcttggcacgtttgttgtaaataattgaccacaaatgtgtgggtttacttctgggctctctaccctgtttgattggttagttggtcggtttttatgctgtgctgttttggttacattagctttgtaacaggttttaaaatcaagtactgtgatacctctaggtttgttcttttcgctttggccatttggggttttttgtggttccatatgagttttaggattgttttattctgtgaagaatgacattggaatttcgttaggcattgcattgaatctgaatatcactttgggaagtatgaatagtttaacaatattcttgcattccatgaatatggatagctttccatgtgtttgtgtcatctactatatctttcatcagtgttttgtattttctagtatatacatctattgcctccttaaatttacttctaagttgctttttctcgatgctactgtaaacgggattgagttcttaatttctttttcaggtacttcattcttagaatagagaaacactgtagattttgtatcctgcaactttactgaatttgtttatcagacttaatggttttttggtgaagttgttagcattttctatatgtgagaccatgacatcagcaaacagatgatttctcttcttcctctgatatggatgcctttatttctttctcttgcctaatcgctcttgccaggacatctaactctgttgaatagcagtggcaagagcgggcattcttatcttgtttttgatcatagaggaaaagcttttacctttttccagggagcatggcagctgtgggcttgttacatatggcctttattgtgtataaacacaatatattccttctatacctaatgtgttgacagtttttatcatgaaataattttgagttgtgtcacatgctttttccatatctatttttttttattattatactttaagttttagggtacatgtgcaaaacgtgcaggtttgttacatatgtatacatgtgccatgtcggtgtgctgcacccattaactcgtcatttaacatcaggtatatctcctaatgctatccctccccacctcccccaccccacgacaggcgccggtgtgtgatgttccccttcctgtgtccatctgttctcattgttcacttcccacctgtgagtgagaacatgcgctgtttggttttttgtccttgtgatagtttgctgagaatgatggtttccagcttcatccatgtccctacaaaggacatgaactcatcattttttatggctgcatagtattccatggtgaatatgtgccacattttcttaatccagtctatcattgttggacatttgggttgcttccaagtctttgctattgtgaatagtgccgcaataatcgtacgtgggcatgtgtcttcatagcagcatattttgtaatccttttggtatatacccagtaatgggatggctgggtcaaatggtatttctagttctagatccctgaggaatcgccacactgacttccacaatggttgaactagtttacactcccaccaacagtgtaaaagtgttcctgtttctccacatcctctccagtacctgttgtttcctgactttttaatgattgccattctaactggtgtgagatggtatctcaccgtggttttgatttgcatttctctgatggccagtgatgatgagcatcttttcacgtgtcttttggcggtataaatgtcttcttttgagaagtgtctgttcatatcctttgcccactttttgatggggttgtttttttcttgtaaatttgtttgagttcattgtagattctggatattagccctttgtcagatgagtagattgcaaaaattttctcccattctttaggttgctgttcactctgatggtagtttcttttgttgtgcagaagctctttagtttaattagatggcgtttgtcaattttggcttttgttgccattgcttttggtgttttagacatgaagtccttgcccatgcctgtgtcctgaatggtattgcctaggttttcttctagggtttttatggttttaggtctaacatgtaagtctttaatccatcttgaattaatttttgtataaggtgtaaggaagggatctggtttcagctttctacatatggctagccagttttcccagcaccatttgtaaaatagggaatcctttccccatttcttgtttttgtcaggtttgtcaaagatcagatagttgtagatatgcggcattatttctgagggctctgttctgttccattggtctatatctctgttttggtaccagtaccatggtgttttggttactgtagccttgtagtatagtttgaagtcaggtagcgtgatgcctccagctttgttcttatggcttaggattgacttggcaatgcaggctcctttttggttccatatgaactttaaagtagttttttccaattctgtgcagaaagtcattggtagcttgatggggatggcattgaatctataaattaccttgggcagtgtggccattttcacgatattgactcttcctacccatgagcatggaatgttcttccatttgtttgtatcctcttttatttcattgagcagtggtttgtagttctccttgaagaggtccttcacgtctcttgtaagttggaatcctaggtattttattctctttgaagcaattgtgaatgggagttcactcatgatttggctctctgtctgttattggtgtataagaatgcttgtgatttttgcacattgattttgtatcctgagactttgctgaagttgcctgtcagcttaaggagattttgggctgaggcaatggggttttctagatatacaatcatgtcatctgcaaacagggacaatttgacttcctcttttcctaattgaataccctttatttccttctcctgcctgattgccctggccagaacttccaacactatgttgaataggagtggtgagagagggcatccctgtcttgtgcccgttttcaaagggaatgcttccagtttttgcccattcagtatgatattggctgtgggtttgtcataaatagctcttattattttgagatacgtcccatcaatacctaatttattgagagtttttagcatgaagggttgttgaattttgtcaaaggccttttctgcatctattgagataattatgtggttttactcgttggttctgtttatatgatggattacatttattgatttctgtatgttgaaccagccttgcatcccagggatgaagcccacttgatcatggtggataagctttttgatgtgctgctggattcggtgtgccagtgttttattgaggatttttgcatcgatgttcatcagggatattggtctaaaattctcttttttggttgtgtctctgccaggctttggtatcaggatgatgctggcctcataaaatgcgttagggaggatttcctctttttctattcattggaatagtttcagaaggaatggtaccagctcctctttgtacctctggtagaatttggctgtgaatccgtctggtcctggactttttttgtttggtaagctattaattattgcctcaatttcagagcctgttattggtccattcagagattcagcttcttgctggtttagtcttgggagggtgtatgtgtccaggaatttacccgtttctcctagattttctaatttatttgtgtaaaggtgtttatagtattctctgatggtagtttgtatttctgtgggattggtggtgatatcccctttatcattttttattccgtctatctgattcttctctcttttcttctttattagtcttgctagcagtctatcagttttgttgatcttttcaaaaagccagctcctggattcattgatttttttgaagggttttttgtgtctctatttccttcagttctactctgatcttatttcttgcctctgctagcttttgaatgtgtttgctcttgcttctccagttcttttaattgggatgttagggtgtcaattttagatctttcctgctttctcttgtgggcatttagtgctacaaatttccctctacacactgctttgaatgtgtcccagagattctggtatgttgtgtctttgttcttgttggtttcaaagaacatctttatttctgccttcatttcgttatgtacccagcagtcattcaggagcagattgtccagtttccatgtagttgagcggttttgagtgagtttcttaatcctgagttctagtttgattgcactgtggtctgagagacagtttgttataatttctgttcttttacatatgctgaggagtgctttacttccaaatatgtggtcaatttggaataggtgtggtgtggtactgagaagaatgtgtattctgttgattgggggtggagagttctgtagatgtctattaggtccgcttggtccagagctgagttcagtgcctggatatccttgttaactttctgtctcactgatctgtctaatgttgatagtggggtgttaaagtctcccattattattgtgtgggagtctaagtatctttgtaggtctctaaggacttgctttatgaatctgggtgctcccgtattgggtgcatatatatttaggatagttagctcttcttgttgaatgatccctttaccattatgaaatggccttctttgtctcttctgatctttgttggcttaaagtctgttttatcagagactaggattgaaacccctgcctttttttgttttccatttccttgtagatcttccttcatcctttattttgagcctatgtgtgtctctgcacgtgagatgggtttcctgaataccgcacactgatgggtcttgactctttatccaatttgccagtctgtgtctttttattggagcatttagcccatttacatttaaggttactactgttatgtgtgaatttgatcctgtcattatgatgttagctggttattttgctcattagttgatgcagtttcttcctagccttgatggtctttgcagtttggcatgtttttgcagtggctggtactggttgttcctttccatgttcagtgcttccttcaggagctcttttagggcaggcctggtggtgaccaaatctctcagcatttgcttatctgtaaaggattttatttctccttcactcatgaagcttagtttggctggatatgaaattctgggttgaaaattcttgtctttaagaatgttgaatattggcccccactctcttctggcttgtagagtttctgccgagagatccgctgttagtctgatgggcttccctttgtgggtaacccgacctttctctctggctgcccttaacattttttccttcatttcaactttggtgaatctgagaattacgtgtcttggagttgctcttctcgacgagtatctttgtggcgttctctgtatttcctgaatttgaatgttggcctgccttgctagattggggaagttctcctggataatatcctgcagagtgttttccaacttggttccattctccctgtcactttcaggtacaccaatgagacgtagatttggtcttttcacatagtcctatatttcttggaggctttgttcgtttcttttaattcttttttctctaaacttctcttttcacttcagttcattcatttcatcttccatcactgataccctttcttccagttgatcgaatcggctactgaggcttgtgcattcgtcacgtagttctcgtgctgtggttttcagctccatgaggtcctttaaggacttctctgcattggttattctagttagccattcgtctaatttttttcaagatttttaacttctttgccatgggttcgaagttcctcctttagctcggagtagtttgatcgtctgaagccttcttctctcaactcatcaaagtcattctccgtccagctttgttccgttgctggtgaggagctgtgttcctttggaggaggagaggcactctgatttttagagtttccagtttttctgctctgttttttccccatctttgtagttttatgtacctttggtctttgatgatggtgacgtacagatggggttttggtgtgcatgtcctttgtgtttgttagttttccttctaacagtcaggaccctcagctgcaggtctgttggagtttggtggaggtccactccagaccttgtttgcctgggtatcagcagcggaggctgcagaacagccaatattggtttataccaaatgttgctgcctgatcattcctctggaagtttttgtctcagaggagtacctggccatgtgaggtgtcagtctgcccctactggggggtccctcccagttaggctactcgagggtcagggacccacttgaggaggcagtgtgtccgttctcagatctccagctgcatgctgggagaaccactactctcttcaaagctgtcagacaggtacatttaattctgcagagatttctgctgcgttttgtttggttatgccctgcccccagaggtgagtctacagaggcaggcaggcctccttgagctgtggtgcgctccacccagttccagcttccctgtggctttgtttacctactcaagccttggcaatggtggctgcccctcccgcagcctggctgctgccttgcagtttgatctcagactgctgtgctagcaatgagccaggctccgtgggcgtaggactctccgaaccagttgtgggatataatctcctggtgtgccatttgctaagaccgttagaaaagcgcagtattagggttggagtgacccgattttccaggtgctgtctgtcactcctttctgtgactaggaaagggaattccatgaccccttgcacttcccgggtgaggtgatgcctcgccctgcttcggcttacgctgggtgcactgcacccagtgtgctgcaccctctgtccaacactccccagtgagatgaacccaatacctcagttggaaatgcagaaatcacccgtcttctgcgtcactcacgctgggagctgtagactggagctgttcctgtttggccatcttggctccacccctttccatatctattcaggtgatcatatggattttgtcttccattctattaacgtggtgtatcacatttatttatttgcatatgttgaaccatctttgcatcccaagggtaaatcccacttgatcatgtgaatgatccttttaatgtgctgttgaattcagtttattagtatattggtgatttttgcatccttgttcatcaaagatgacatggtagcttggattacaggcgcccgtcaccatgcccaactaatttttgtatttttagtagagacagggtttcaccgtattggccaggctggtcttgaactcctgacctcagttgatccacccacctcggcctcccaaagtgctgagattacaggtgtgagccactgcacctggcctgcggtattttcttttaggacatttaacagatgtatttgattactgataagactttccatattaagttgatagtactttttattcttgtctgggtttttataatttattttattggtatcttccaagaagcatttgctatggtttgaatgtcctctccaaaactcttgttgaaatttaattaccatggtgacagtattaaaataggggactaatatagtttgagtctgtgtccccgcccaaatctcatgttgaattgtaatttccattgttggaaatggggcctggtggaaggtgactggattatgggagtggatttctcatgaatggtttagcaccaaaacccttggtactgtcctcacaatagtgagtgagttcttatgtgagctgataatttaaaagtgtgtagtggtcaggcactgtgtctcctgcctgtaaccccagcactttgggaggccaagatgggaggatcagttgagcccaggagtttgagaccgacctggccaacatagcaagacctcgtctctattaaaaaaaattaaaataaataaatacgtaaaagtgtgtagtactgcccactttgctctcttgctttcaccatgtgaagtgtctgcttcctcctccccctgctttcaccatgtgaagtgcctgcacccactttgcctcccaccatgagtgaaagctccctgaggtgtccccagaagcatatgccaccattcttcctgtacagcctgcagaactgtgagccagttaaacctcgtcttttataaattacccagtctcaggtatatctttataccaatgtgagaatggtatacattaaaagaatggtatatattaaaagaaccttttaatggttcctgtattaggattaggccatgagggccttgccctcatgaatagattaatatcattatcacagtagtgggtttgttaccacaagaatgtgttgttataaaaattttctgtcccttgctctcaccctcacttgtcgttctgctttctgccatgggaaggtgtaggacaaaggtcctcaccaggagccagcaccttgatattggaattttcagcctccataactatgagaaataaacttcttttctttgtaagttacctatcttgtggtattctgttaaagcaaagcaaagtggactaagacaccatacctacagagggcagcagagacatagcagtgaattctcataacctaatttttcaggaagtgtgaaggaaattggatttaggtgaactttgttatgtcattcttatatactttatgtagtgactcctatgcaaatacaggctaatagacataatcaatgtaaagtaatgtgagtgagactcaggcacatttgtgagaaggtaaacaacaagctggctggcacagataagagatctgaaagtagttcatgtagttttaaaggaaaagtaaatgtggctttcaaatttgaaatacggattcatttttatgaaacagatattttgtttgtattcttatcagtaagggtagaaaaaatgattcagtaactcatagaagatggaattacggaaaagtttaaaaaaacaggaataaacaaaattttgtactacatgggagtgtattataatcttgcagaaagtgatctgacaaacctttaaaaacatttctaaatttaatgtgcatatgtataattttctgtatttttacttatttatataaatttttgaaaatcagttttgcttttaatcggttttaatagtgagttagaataaaatgatatgactagatgtgtactaattgttaatgcctaagaactgcccattgttttcatcttttttcccaatgttttacattttaaaatacacataacataaaatttactattttgaccattttaaaatgtgcaattcagtggtattgagtatcttcataatgttgtgtaactaccatcaccaccttctatctccagaactcttttcatcttgtaaaattgaaattctgtactcattaaacagtaactcctccttctgtctttccctagctcctggcaaccaccattctactttgtgtatgattttgactactgtaattacctcatatgaatagaatcatacagtatttgtttttctgtgactggtttatttcacttagcataatatccttaaggttaatccatgttgttagaattttttatttttattttttgagatggagtctcactctgttggccaggctggagtgcagtggtgcgatcttgactcactgcaacctccgcctcctgggttcaagtgattgttgtgccttggcctcctagtatctgggattataggcgcacgccaccacgcctagctaatttttgtatttttactagagacagggcttcactatgttggccaggctggtcttgaactcttgacctcaagtgatccgcccacctcagcctcacaaagtgctggggttacaggcatgagccaccgagcccggctagaatttccttctttttaaaggctgaataatattccattgtatgtttataccacattttttacttaatttgtgacctaacatatggtctatcctggaaaatgttctatattcacttgagaagaatatgtatgctattgttgggtacagtgttgtgtatatgtctgtcagatctagttggttattgtctgaggtcctctgtttccttacttatcttcgatctggttattctatccactattgaaagtagggtattgatttaatcatctgttatttagaaaggtctgtttctcccttcagttgtctgtttttccttcatgtatttttgaggtcttttaattggtgcataaatgtttataatttttgtcttcttgttgtatcaaatcatgtattcatatataatgtcctttgtctcttgtaaccttttttgatttagactgttttctctgttgttagtatagccacctctactctgttctggttagtatttgcatggaatatctttttctgtcttttaattttcaaactgtgtctgtcagtctaaagtaagtctagtataggcaacatatggttgaatcctcctccattctgtcaatctctgtcttttgattggagagtttaatccatttgaatttaaattatttgtacagaaggatttctgtcattttgttgtttgttgtttacataacttactgctttttgtgggggccctcatttcctgcattactgtcttcttttgtgtttacttgatttttttcatgaaatgtttaaattcctttcttctttctttcttcttttttttttttaatggagtctctatcgcccaggctggagtgcagtggcatgatcttggctcactgcaacctctgcctcctgggttcaagcagttatcctgcctcagcctcctgaggctgggattacaggcatgtgccaccacgcctggctcatttttgtatgtttagtagagatggggttccacaatgttggcccagctggactcgaactcctgacctcaggtgatccacccaccttggcctcccaaaatgctgggattacaggtgtgagccaccgcacccagcctcttttctcatttcgtttttttttttttttttttttttgagacagagtctcactctgtcacccgagctggagtgcagtggcacagtctcaactcactacaacctctgcctcccgggttcaagcgattctcatgcctcagcctccctagtagctgagattacaggcgtgtgccaccatgcccggctaatttttgtatttttagtagagatggggttttgccatgttggccaggctggtctcaaactgccaacctcaggtgatcttcccgccttggccttccatagtgctgggattacagtcatgagccactgtgcccgccctagtactttgaacaactttaaaacagttgtcataaagtctttctctggaaggtctgccatcaggtctttttcaaggacagttgtgttgttttatttttttttcttttgaatgtgtcatactttcctgtatatcttgttatttttttgttgaaaacagggcatttgaatataatgatgtggtaagtctggaaattagattctccctcttccccagcatttgctgtttgttttgttttgttttgaggcagagtctcactctgttgcccaggctggagtgcagtggtgtgatctcggctcactgcaacctctacctcctgggttcagccgattctcctgcctcagcctcccaagtagctgggattacaggtgtgtgccaccatgcccagctaatttttgtgcttcttagtagagatggggtttcgccatgttgcccaggctcgtctcaaactcctgacctcaggtgatctgcccacctcagcctcccaaagtgctgagattataggcatgagctaccatgcccggcctgctgttttttttttttttttctaatgttactgtttttgtttatttttattgtttgaggcttgtctgtatgtgaaggatcagcctgaggtgtaagcttaagattctctgagtcttttctaagcctgagtttttctccaggaatgtgcaggaagtttctaatttttcccttatatacagttgctttcaaatgccgtagtctttaacatctgactcccaaaagggaaaaagagaaaaactaaatcctttaaatccccagcagttactttgtgggtgggggtggggatgggggtgggagagggcttgtaacagtgagtggagatgaagcaacaatgtgtgtccacctctttgtcccatttctgtgatcagaagtagcattcagtgatcagggcacacatgccctatatttggaagagagggtcctttttgcctgtccttggttcctgtaagctgcgcgcaagctgctccttggaatgcatgcacaactgcctgccttggggctgagggtggcaaatggatagctgctactgtgctagtgctaatacctgcaagtgattaaaattatattcaggccttcccctggacattaacaagccttcagtagattccagagtttcaaaatagttaaatagaacagattctgccagtgcaatgatcttctaggtggagcaacacatgcgtggtgcttcctactccaccatcttcccagaatcctctgattgcgtataagttacctatagttgaaagagtttaattctgatcatcatacattttagaaacctctcatatatgtttatataaaaactgataaaatttagtgcttgtaaagggaaatctggagttcttagtcaagctttttgtatgattatattttaaagatttaattatagaaacattgtactgaagtctatattccagtgtgttcttatggtaaaaagaaaaggttggagattttattgaggagtctgtatttttttactgttattttatattataactcatgtattatatactgtatctgttcattatcttagtatagcattttcgggcttttattctctttatgaaagtgagtaactgtaggtaccaatatcaattgttgcatctgtgccagaaattatattttatcttttcatcatctcccttcttgtatagctgaactttagcttaaaagatgccaggacaaggagtttgtcagattgttccttttctttgcatgaaccttcttcccctttcagtatcactgggtcatcttatttcccttcattcccctctttcttctccatcttttcatttcccaaatacttctgttttctgatataagaaggactataacagaaaatgattgctttaggaaatattgttacaactgtgtaatgttaaaaagtagtaagttggccaggcacagtggctcacgcctgtaatcccagcactttgggaggctgaagtgggcggatcacgaggtcaggaggtcaagaccattctggctaacacagtgaaaccctgtctctaaagaataccaaaaaaaattagccggacatggtggcgggcgcctgtagtcccagctactcaggaggctgaggcaggagaatggcgtgaacccgggaggcagagcttgctgtgagccgggattgcaccactgcactccagcctgggcgacagactctgtctcaaaaaacaaagtaataagtcggccagcgctgtggctcacgcctgtaatcccagcactttgggaggccgaggcaggcagatcacgaggtcaggagatttgagaccatcctggctaacacagtgaaaccccgtctctactaaaaatacaaaaaattagccgggcgtgttggtgggcgcctgtagtcccagctactcgggaggctgaggcagaagaatggtgtgaacccaggaggtggaggtcgcagtgagctgagatcgcgccgctgcactccagcctgggtgacagaacgagactccatctcaaaaaaaaaaaaaaaaaaaagtcactatggatgtcacttttgtagtcttctggtattataaacaattctttggagttgtgcttttaataattacagaggggcacatgtcggactacctttcctgaaaataacaatgacaacttttggacaaaatataaaaaaagtatgtgaaagcacagtaggaggacagaaagtaggaagaaactgaaggatgttgacatttggaagatagaatggtataagatgagcatttcattttttgtggatgtttcccagaggacagaactcggtcattggttgtgtaggtgacggaagcttgaataaaaaccacaagacagagttaggggtgactctagcagctagaaagttagtgagtataaagtagtctttcataaagaagggtgtcccaaattctgcataaaagtcttaggctaaaataactaaagatatttcatttgcacaagaaagagttcagaggtgtatagccaacttacctacctattaagcaaaaaaaaactaaatagtcttcagaagaacataatcaaatccagagtttctaaaaatgtactatgcacagtgtccagaatacaatccatattcagtagacacacacatacacaaacagaaaaatgtgacccatacttaagtgaaaagccaattaattgagactggccttgatatgactcctatgttagaattagcagctgttataactcttcttaaggttatataaagaaaatatgtacaccatgaataaacagataagaaacctcagctgaaaaatggaaactaggtaaaaggactaaatgaaaattctataggtaaaaaatacaatatttcaaatgaaaactgattagagattacagaagattaggaaaagaaaaggagtcattgaagttgttggattcatagaagttattctttcttaaaaagtgaaaaagagatttcaaaaaatgaagctagcctcagtggctggtaggacaatatcaaaaggtctaacacttggagtcctagaaatagaggccaggggaaattgggtcaaaaaattctggagaaattatggctggaaatttccctaaattggtaaaaaacatgaatttacatgttgaagaagttcagtgaattccaaacaagataaatacaataaaataacacttaagtacattatagtgaagctgttgaaaataatagacaaaaaatcctgcctagttgcagtggcttatgcctgtaatgccaacacttggggaggccaaagaggggtattgcttgagctaaggagtttgagaccagcctgggaaacgaagtgagacttcatctctacaaaaagaaaaaaatcttgaaagcaccctgagaaatgctaatgaatggtagctgacttctttttttttttatattattattatactttaagttttagggtacatgtgcacaatgtgcgggtttgttacatatgtatacatgtgccatgttggtgtgctgcacccattaactcatcatttaacattaggtatacctcctaatgctatccctccccacttcccccatcccacaacagtccccggagtgtgatgttccccttcctgtgtccaagtgttctcattgttcagttcccacctatgagtgagaacatgcggtgtttggttttttgtccttgcgatagtttgctgagaatgatggtttccagtttgatccatgtccctacaaaggacatgaactcttcattttttatggctgcatagtattccatggtggatatgtgccacattttcttaatccagtctatcattgttggacatttgggttggttccaagtctttgctattgtgaatagtgccgcagtaaacataggtgtgcgtgtgtctttatagcagcatgatttatagtcctttgggtatatacccagtaatgggatggctgggtcaaatggtatttctagttctagatccctgaggaatcgccacactgacttccacaatggttgaactagtttacactcccaccaacagtgtaaaagtgttcctgtttctccacatcctctccagcacctgttgtttcctgactttttaatgatcaccattctaactggtgtgagatggtatctcattatggttttgatttgcatttctctgatggccagtgatggtgagcattttttcatgtgttttttggctgcataaatgtcttcttttgagaagtgtctgttcatatccttcacccactttttgatggggttgtttgtttttttcttgtaaatttgtttgagttcattgtagattctggatattagccctttgtcagatgaggtaggttgcgaaaattttctcccattttgtaggttgcctgttcactctgatggtagtttcttgtgctgtgcagaagctctttagtttaattagatcccatttgtcaattttggcttttgttgccattgcttttggtgttgtagacatgaagtccttccccatgcctatgtcctgaatggtattgcctaggttttcttctagggtttttatggttttaggtctaacatttaagtctttaatccatcttgaattaatttgtgtataaggtgtaaggaagggatccagtttcagctttctacatatggctagccagttttcccagcaccatttattaaatagggaatcctttcccgaaaactggcacaagacagggatgccctctctcaccactcctattcaacatagtgttggaagttctggccagggcagtcaggcaggagaaggaaataaagggtattcaattaggaaaagaggaagtcaaattgtctctgtttgcagatgacatgattgcatatctagaaaacaccatcatctcagcccaaaatctccttaagctgataagcaacttcagcaaagtctcaggatacaaaatcaatttgcaaaaatcacaagcattcttctagaccaataacagacaaacagagagccaaatcatgagtgaactcccattcacaattgcttcaaagagaataaaatacctaggaatccaaacttacaagggacgtgaaggacctcttcaaggagaactacaaaccactgctcaatgaaataaaagaggatacaaacaaatggaagaacattccgtgctcatgggtagaaagaatcaatgtcgtgaaaatggccatactgcccaaggtaatttatagattcaatgccatccccatcaagctaccaatgactctcttcacagaattggaaaaaactactttaaagttcatatggaaccaaaaaagagcccgcattgccgagtcaatcctaagccaaaagaacaaagccggaggcatcacgctacctgacttcaaactatactacaaggctacagtaaccaaaactgcatggtactggtaccaaaacagagatatagatcagtggaacagaacagagccctcagaaataatgccacatatctacaaccatctgatctttgacagacctgacttcttatcagaaataatgcaggccagcaggctataaacacctttaaagtactgggaaaataaaaatcaactcagaattctgtagccaaataagaaaacatactttctagctaagaaaatctttatactacaagaaatgtttaaggagatacttcaagctgaaggaaagtgttaccagctgaaactcagaacttcaggaatgaagagcactgcaattggtaaaaatgtaagtcttccccactccattaagaaatatacagttgtgactgtttaaagcagaaattataatgttacaatatggcatttatatatgactgctgtgtataaaggatgagtctaggttgatggagctgtgtgcttactgtggtctttattttatgaaggggtagaattagctttaagtacactgcaaagttaaagatatacattataattcctagaacaaacactggaaaagaaaaaaatgcaaagaggtgataactaaaaaacaagagaagtcaaaatggaattctgaaatgtatttagagaaaatgaaaaaaggtataaaggaaggaacagcagaatataaaacaaatgagatgtgtgtcagtctgttctcatactgctaataaagacatactcgaaactgggtaatttatgaaggaaagaggtttaattgacccagttcagcatggctggggaggcctcaggaaacttacaatcatggaggaaggggaagcaaacatgtccttcacagggtggcagcaaggaacagaatgagagcaaagttgggggaaagccccttataaaaccatcagatctccttagaactcactcattatcacgagaatagcatgagggtaactgctccatgatgcagttacctcccaccaggtcccttccacgacgtgtgaggattatgggaactacaattcaagatgagatttgggtggagacacagccaaaccatatcaggatgtaaagaaaacaaatagcaaacttacaaacctaggtcaggtctatgaataattaccttaattgaaaatagattaagtgttttatttgaaggtagagattcatacattggatagaaaacaagacttcctgtattctgtctaccagagatgcattttaaaaataatgacacagatagattgaaagtaaatgtatgaggaaaggtgtagcatgcaaacagtaagtataagatggagttgttatattaatattagataagtagacttcaagacagtactggagataaagaagggcatttcatagtgataaaactcattagaaatacatagtaatcataaatttgtatatacctaataagatctacagtcataggtggaaattttaacactactctgtaacttatagaaaacctagacaaaaaatcagttagaatatagaagatctgtaaaaatacttcagccaccttgacctaactgacatttgtagaatatcatgggcaactaaaatagagtgtacattctattcaagtacacatgatatgcataccgagataaataatatatgggtcctaaaacatgtctcactacatttcaaaagtttgaaatcctaaagagtatactctgtaactacagtagaatttaaagtagaaaccaatagcaataagatattcaggaaaaatctgaatatttggaagttaaacagcacagttatccctagtcgatctatgaatttaatgtggttcaaatcattttcttagcaggacttttctcttttggtagaaattgacaagctgattataacgtttatatgaagatagaaaggacctatgttatacaaagcaatcctgatgatttacaaggtggaaaacttaaatttccttatttcaagatttactctaataatacagtaatgaagactgtgatatcagcataaggatataaaagcatataaatggagcagaacagataactgataaattatttttaacaaagacagctatccaatgagggaaaagaaaggcttttaaataaaaagtgctggaacaactagacatctgtatggatgaaagttcaccttgactccctacctcacatggtacccaaaagataaatcaagatgaatcatagatctatatgttgaagctaaagtataaagcttttagaataaacaaagaacaggcaaaggtttccttgataggatacagaaagcagcaactgttttaaagaaaacacctaacactctataaacttcttcaaaataaaaaacttctgctcattaagagacatgaagaaaataatagcaaaacctgtatctgtaaaggacttgtattaagactatgtaaagaaattctacaactgaacaatgaaaatacaacttgattaattggagaaggattagtacacacacttcataaatgatgctatattgaatggccagtgaacacatgaaaatgttactaaacatcgtcaattattaaggaaatacaaaagtaaactgcaaggaggtgctgctttacttgtcccattagcttaaagagtaatactaccatatatgtagagcaatgagaactcttataaaattaagagtttttctaccctaacccatgacttagcaattctactcctagttatttacttaatagaaaaagaaaacacatctacaagatttgttcaaaagtgtttataataggccgaaactggacacagctcatatacccaccagttggagactggatcaacaaataggtatagtcataaatggaatacaacttagcaatgataaggaacactgtcttggtacatcaacaacataatgaatttcaaatacatggtaggtgaaagaaaccttacacaaaagagtacattctgtattccatttacatcgagttctagaacaggcaaaattgatacataatggaagaaaaagcagtgctgtcttcgatagtggggtggggattaattgcgaaaagtcttagaggaacttgctgggtgataggaagtattttatttcttgtttggagtttgagttcagtgctatatgtatatgttaaaacttatcaaatggtgtgtcttttattgtatataaaacctactgaaaaaagtaaatacatattaatagaaatatacattgaattcttgttattgatgttcatgctgagatataatgggatgatgtgtactgtcatctgcaactttgaaatgcatcgaaaagtaagatggattggtggagccaagatggctgaatgggaacagctccagtctagagctcccagcttgagcgacgtagaagacgagtgatttctgcatttccaactaaggtactgggttcatctcactggggagtgtcggaaagttggtgcaggacagtgggtacagtgcacccagcgtgagccgaagcagggcgaggcatcacctcacccaggaagcgcaaggggtcagggaattccctttcctagatggagaaagggatgacagatggcacctggaaaattgggtcactcccaccctaatactgcgcttttccaatggtcttagcagatggcacaccaggagattgtatcccacgcctggctcggagggtcctacacctgcggagcctcgctcattgctagcacagcagtctgagatcaaactgcaaggcagcagcgaggctgggggaggggcgcccaccattgccaaggcttgagtaggtaaacaaagccacagggaagctggaactggatggagcccaccacagttcaaggaggcctgcctgcctctgtagactccacctctggaggcagggaataaccaagcaaaaggcagcagaatcctctgtagacttaaatgtctgcagcttcgaagagagtagtggttctcccagcacgcagctggaggtctgagaacagaaagactgcctcctcaagtgggtccctgacccccccgagtagcttaactgggaggcaccccctagtaggggcagactaacacctcacatggccgggtactcctctgagacaaaacttccagaggaacaatcaggcagcaacatttcctgctcaccggtatccgctgttctgcagcctccactgctgatactcagggaaacagggtgtggagtggacctccagcaaactccagcagacctgcaactgagggtcctgactgttagaaggaaaactaacagaaaggatatccactccaaaaccccatctgtacgtcactatcatcaaagacccaaaggtagataaaaccacaaagatggagaaaaaacagagcagaaaaactggaaactctaaaaatcagagtgcctctcctcctccaaaggaacacagctcctcaccagcaacggaacaaagctggacggagagtgactttgacgagttgagagaagaaggcttcagacgatcaaactactccgagctaaaggaggaagttcgaacccatggcaaagaagttaaaaaccttggaaaaaaacgagacaaatggctaactagaataaccaatgcagagaagtccttaaaggacctcatggagctgaaaaccacagcatgagaactacgtgacgaatgcacaagcctcagtagccgattcgatcaactggaagaaagggtatcagtgatggaagatgaaatgaatgaaatgaagtgagaagagaagtttagagaaaaaagaattaaaagaaacgaacaaagcctccaagaaatataggactatgtgaaaagaccaaatctacgtctcattggtgtacctgaaagtgacagggagaatggaaccaagttggaaaacactctgcaggatattatccaggagaacttccccaatctagcaaggcaggccaacattcaaattcaggaaatacagagaacgccacaaagatactcgtcgagaagagcaactccaagacacgtaattctcagattcaccaaagttgaaatgaaggaaaaaatgttaagggcagccagagagaaaggtcgggttacccacaaagggaagcccatcagactaacagcggatctctcggcagaaactctacaagccagaagagagtgggggccaatattcaacattcttaaagacaagaattttcaacccagaatttcatatccagccaaactaagcttcatgagtgaaggagaaataaaatcctttacagataagcaaatgctgagagatttggtcaccaccaggcctgccctaaaagagctcctgaaggaagcactgaacatggaaaggaacaaccagtaccagccactgcaaaaacatgccaaactgcaaagaccatcaaggctaggaagaaactgcatcaactaatgagcaaaataaccagctaacatcataatgacaggatcaaattcacacataacaatattaaccttaaatgtaaatgggctaaatgctccaataaaaagacacagactggcaaattggataaagagtcaagacccatcagtgtgcggtattcaggaaacccatctcatgtgcagaagacacacacaggctcaaaataaaggatggaggaagatctaccaaggaaatggaaaacaaaaaaaggcaggggtttcaatcctagtctctgataaaacagactttaaaccaacaaagatcaaaagagacaaagcaggccattatgtaatggtaaagggatcaattcaacaagaagagctagctagcctaaatatatatgcacccaatacgggagcacccagattcataaagcaagtccttagagacctacaaagatacttagactcccacacaataataatgggagactttaacaccccactatcaacattagacagatcagtgagacagaaagttaacaaggatatccaggtattgtactcaactctgcaccaagcggacctaatagacatctacagaaccctccaccccaaatgaacagaatatacattcttctcagcaccacaccgcacttattccaaaattgaccacatagttggaagtaaagcactcctcagcaaatgttaaaagaacagaaattataacaaactgtctctcagaccacagtgcaatcaaactagaactcaggattaagaaactcactcaaaactgctcaactacatggaaactgaacaacctgctcctgaatgactactgggtacataacgaaatgaaagcagaaataaagatgttcttggaaaccaacgagagcaaagacacaacataaccagaatctctgggacacattcaaagcagtgtgtagagggaaatttatagcactaaatgcccacaagagaaagcaggaaagatctaaaattgacaccctaacatcacaattaaaagaactagagaagcaagagcaaacacattcaaaagctagcagaaggcaagaaataactaagatcagagcagaactgaaggaaatagagacataaaaaacccttcaaaaaatcagtgaatccaggagctggtcttttgaaaagatcaacaaacttgataggctgctagaaagattactaaaagagaaaagagagaagaatcaaatagatgcaataaaaaatgataaaggagatatcaccactaatcccacagaaatacaaactaccatcagagaatactataaacacctctacgcaaataaactagaaaatctagaagaaatggatacattcctggacacatacaccctcccaagactaaaccagaaagaagttgaatctctgaacggaccaataacaggctctgaaattgaggcgataataatagcttaccaaacaaaaaaagtccaggactggatgaatttacagccgaattctaccagaggtacaaggaggagctggtaccattccttctgaaactattccaatcaatagaaaaagagggaatcctccctaactcattttatgaggccagcatcagcctgataccaaagcctggcagagacacagcaaaaaaagagaattttagaccaatatccctgatgaacatggatgcaaaaatcctcaataaaatactggcaaaccaaatccagcatcacatggaaaagcttatccaccatgatcaagtgggcttcatccctgggatgcaaggcaggttcaacatatgcaaatcaataaacataatccatcatataaacagaaccaacgagtaaaaccacatgattatctcaatagatgcagaaaaggcctttgacaaaatttaacaacccttcatgctaaaaactctcaataaattaggtattgatgggacgtatctcaaaatagtaagagatatctatgacaaacccacagccaatatcataatgggcaaaaactggaagcattccctttgaaaactggcacaagacagggatgccctctctcaccgctcctattcaacatggtgttggaagttctggccagggcaatcaggcaggagaaggaaataaagggtattcaattaggaaaagaggaagtcaaattgtccctgtttgcagatgatacgattgtatatttataaaaccccatcgtctcagcccaaaatctccttaagctgataggcaacttcagcaaagtctcaggatacaaaatcaatgtgcaaaaatcacaagcattcttatacaccaataacagagaaagagagagccaaatcatgagtgaactcccattcacaattgcttcaaagagaataaaacacctaggaatccaacttataagggatttgaaggacctcttcaaggagaactacaaaccactgctcaatgaaataaaagaggatacaaacaaacagaagaacattccatgctcatggacaggaagaatcagtatcatgaaaatggccatactgcccaaggtaatttatagattcagtgcgatccccatcaagctaccaatgactttctgcacagaattggaaaaaactactttaaagttcatatggaaccaaaaaagagccggtattgccaagtcaatcctaaggtgaaagaacaaagctggaggcatcgtgctacctgacttcaaactatactacaaggctgcagtaaccaaaactgcatggtactggtaccgaaacagagatatagagcaatggaacagaacagagccctcagaaataatgccacatatctacaaccatctgatctttgacaaacctgacaaaaacaagaaatgggaaaacgattccctatttaataaatggtgctgggaaaagtggctagccatatgtagaaaagtgaaactggatcccttccttacaccttatactaaaattaattcaagatggattaaagacttaaatgttagacctgaaaccataaaaacccaagaagaaaacctaggcaataccattcaggacatgggcatgggcaaggacttcgtgtctaaaacaccaaaagcaatggcaacgaaagccaaaattgacaactaggatctaattaaacgaaagagcttctgcacagcaaaagaaactaccatctgagtgaacagcaacctacagaatgggagaaaatttttacagtctgctcatctgacaaagggctaatatccagaatctacaatgagctccaacaaattttcaagaaaaaaacgccatcagaaagtggtcgaaggatatgagcagacacttctcaaaagaagacatttatgcagccaaaagacacttgaaaagatgctcatcatccctggccatcagagaaatgcaaatcgaaaccacaatgagataccatctcacaccagttagaatggcagtcattaagaagtcaggaaacaacaggtgctggagaggatgtggagaaataggaacacttttacaccgttggtgggactgtaaactagttcaactattgtggaagtcagtgtggcgattcctcagggatctagaactagaaataccatttgacccagccatcccattactgggtatatacccaaaggattataaatcatgctgctataaagacacatgcacacgtatgtttattgggggactattcacaatcgcagagacttggagccaagccagatgtccaacaatgatagactggattaagaaaatgtggcacatatacaccatggaatactatgcagccataaaaaaggatgagttcatgtcctttgtagggacatggatgaaggtggaaaccatcattctcagcaaactatcagaaggacaaaaaaccaaacagcgcatgttctcactcataggtgggaattgaaaagtgagaacacaggggcacaagaaggggaacatcatacgccggggcctgttgtcgggtgggggcagggtggagggatagcattaggaggtatacctaatgttaaatgacgagttactgtgtgcagcagaccaacatggcacatgtatacatatgtaactaacctgcacattgtgcgcatgtacccgaaaacgtaaagtataataaaaaaagaagaagaagagaaaaaaaaaagaaaagtaaggtggattaatggatagagaaatgtgataaactgtcatagctaaataataacaattgtaaagccttggtgatgtatatattggtttttgctagtatctctaaaaaatttctggtcgaaatttgcataatattctgtgtgaaaaatcttctcagggaacatagacctgtgttattgtatttatgtaagtagttgtcatataattcttttatcttagagaatctgaagtttccaatgtgagtgtacagtgtctcaccaccacctgagtttatttctggttgttgtaatgcagtacaattgataatgaaatttttttgatgtttttgccgtagacatggaatgtatagtgctctagcttttactttttgagagacagaaaaaggccctgagcattggtgttgtgtcagtcatcctaggctcagatctccattctacctctcactgaatgcttggccttaagcaggtatttaacttttttttagatccaattggtttgtctgttaaatgccttcagtaacgtattcctcacatagttgctttgaagattggtgagtcatggcacagcacacagctgaacatagaagacattcaagcaatgccagattcctttagggtgcaggtagacattcctagggtttgtaatagatttagaagtagaattagtcttctacttcttcagatctcctttgaggtctgagtgactacagaacccatggacacctttatttacgaaatgctgtgtttctggtgtctaaggcctgattgcatcttgattggaaactattagttaaacatttataagaaataatactgtaacttttgtttaagctaaaaattattttcttgaattttagtttattggtcttagttaatactataacctttacagtgctaaaaagttataatccaattgtgttctctggtgacattaactgaaatacatgttcttttctagagaccttattctgtaaatcataataaaaaatttcttatgaaattaagtctttatagatacctcatttaattcttaccattctattaataaaatacatttttatattacttatatgtattgagtatcttgtctgaaatcacacaactagaaagtagaaagttgtcatttgaacacaactctgtgtgattcttaaccttgttttcttagccattttgctgaatggcctttccttctttcccctatcccccatcccccatcccccatttccatgtatgtgtctgttgtcattctctactagctttttcttcttatgtacaaataggtcagatgtctacatttaaataaacagcatctttaaccctgctgctcccatactcaagacaaattgacaagtatgttattatctgtgctgtgaagtgaaattagatcttttgatttcaacatcaaaaccttataagatgttttatcttttttagaagtccttaatcacaagttagagcaattaacacctatattactaataatatttccagtagtatggatgctttggttatggttaaatggttctgaaatctacacctgagatgcttcccttaaaggggctctttggccagttcaccaattacttggaagaggaagaggaagtctaggttgattatattgctttgagttagaatatctgagaaagtggtacttatattagtttgctagtgctgcgatgataaagtactacatactggatggcttcaataacagaactttattttctcacagtcctagaggctggaagatcgtctgggacaagtccaggtgctggcagggttgatttctcctgaggcctctctctgtggcttgcaaggtggctgtgtcttgacatggcctcttctctgtgtgtccctcccccttcttataaggatgtcagtcagattggattagggcccaccctaacggcagcattttaacattcacttatttaaagaccttatctctaagaacattacattctgaggacctgagactttcagtgtataaatttgggaggacacaatttagcctataatagtgctataaagagaagttcaaaaatgaagatggagattttattttttaagcaaaaaaataagtttgcttttagagtgttaaattgggaatgtacactagatagttgatgttgtcacttgggatttggaagagaacacaaggttggttgcttgatttggaaagcatttgcttagaggtagtatattaaaattagagcaacataaggaaattgatttttctccacatttctgggacaagaggaaaaagtagtataagtaatcgtaaaaaattcttagaaagtatgaagaaaggagcccacaagagaaatttgaaggataagatttgtttctcatggacttatttcagttggtcagtctattttcctttttttaaatgccagaaaatttaaaacatcaattgtaatgaaaatgtttttcagattagaaatattttggaaggaatttacttaaaacaagttactgatctaaccaacttcttgagttccaaagccatggagacatcttatggtgctccagacaatctatccctttttctgtccctggcagctgtagcttcaacattcgagacagagttatgtgagatttgtgctctttctttgagagtggaggactcttctgggcatgggtgcctgatgtcctgaggtgggatcattgcctcctctttctgttttccccaaatgcctctgcaatgactaggttgttgaaattttcctggccctaagcactattttaggggatctaagaggaagaaagaagtcttccagcacacctaaaggtgacaggaagataatggcaacttgactgtcctttcttttgaccatctctatctttttccaaaataagcttcatccatgctttttttttcttttaagacagggtctggctttgtttctcacaatggactgcagtggtgtgatctcacagctcactgcagcctccacctccccagtctcaggtgatcctcccacctctgcctccgaagtagctaagactagtggtgcatgccaccacgtcctgctcgtttctgtatttatttatttattttatttttttctagagaggcaaggttttgccatgttgcccagactggtctgaaattcttgagctcaagccatctgcctgtctcagcctcccaaagtgctgggatttcaggcatgagccaccacacctaatttcttttatgtaataatggaaaatgcaactcttttctttaaagaatgtttgctttcagccttgccacgtacatacacatctttagcaacatccagtttgttaccaggtctctcagtttactttttaaaaattttactttattgaggtgaaattcacatagcatcaaattaacattcaaaagtgaataattcagtggcacttggtggattcacaaagttttgcaactaatacctgtatctcattctaaaacatttcatcactctgcaaggagacactatactattaagcatccattccgtattccccacctcatctcagtccttggtaacaccagtctgctttctgtctctgtagttttacctgttctgttatttcacataaatggaaatcatatagcatgtgaccttttgtgtctggcttcttaacaaaatgtttttgaggttcctccacattgtagcatgtatcagtacttcattcctttttatagctggataatgttccattgaatgtatatgccacacgttgtttagccattcatccactgatgtgtatttatttcctccctttggctactgtgaatagagctgctagaaccctggtttacacatttcggagtacctgttttcagttctcttggatatatatgaaggagtgaaattgctggactatatggtaattttatgttactctttgaaaaactacctgttttctgcaatgactgaaccattttacattcctgttagcaacgcacaaaggtttcagtttctccacatcccttgccagcacttacattatggtctcttctacccacttaaaaaaaaaatcctagtggctgtgaaatgataccttattaaggttttggtttgcaattctctaatagctaatgatgatgagcactgtttcatgtggtggttggtgatctgaatatcttcttggaaaaaatatctattcaagttttttgttgatttctttttctggttgtgttataagagaatgatctatatattctggatactagacccttgtcaaatatatgactggcaaatgttttctcatattcagtaggtggttttttcacttttttttttttttttttgagacagggttttaattttgttgcccagctagagtgcactggcacaatcatggctcactatagcactacagccccaacttccccaggctcaggtaattctcccacctcagcctctcgagtagctgggactacaggcacgcaccagcacacttggctaattttttccccctcgaggcagagtcctgttctgttgcccaggttggagtggagtggcgcaatcttggctcattacaacctccacctcctgtgtttaagtgattctcctgtctcagcctcccaagtagctgggattacaggcacgtgccaccatgcctggctaatttttgtatttttagtagacacggggtttcaccatgttggccaggctgatctcaaactccagacctcaggtgatccacttgtcttggcctcccaaagtgctgggattataggcataagccactacacctgacctgatttttgtatttttgtagagatagggtttcgccatgttgctcaggcttgtcttgaacccctgagctgaagcgatccacccaccttggccttcgaaagtgctgggattacaggcatgagccacgacccctggccgtgttttttttttggtttttttttttcacttttttgacaatattcttggatgcacaatagtttttagttttgaaaaaagttcagtttatctattatttcttctgttgctcataatcttggtgtcatatctaagaaacaattgccaaatccacgatcatgaagatctattatctatgttttcttaggtttttgctcttctatttaggccattgatgtatgttgaattaatttttgtgtatggtgtgaggcaggtggtccaactacatttttttttttaaagagataaagtcttgctctgtcactcaggctggagtgcagtggcattatcatagcttactgcagccttgaacctctgggcccaagtgatccgctcacctcgacctctcaaatagctaagacttcaccaagactggctaattattttttttttttttttcagagatggggtcttgctatgttatccaggttgttctcaaactcctggcttcaagtgatcctcccacctaagcctcccaaagtgttggtgataacaagcgtgagccaccacgttgggtaccaacttcatttttttgaatatggaaatccggttgtcccagcaccatttgttgaaaagattattctttccttactggcaggtcgtgacacccttgtttagtgtattgtatctcttatgcagagcatacagtggaatcttcacttttttatcctgcatgacagtctctacctttggctgggttaatttatgtacatttaatgttattgttgatatagttgcatctatgtacaccagtttactttttctttttctaaatgtttcagggttttttttctcaagtctttcctcatttcttttactttaaagcagtattttctttggcaatatttagttcttctaatgtcattttcacaattttttttttctttttggaaacagcatcttgctctgttgcacaggctagagtgcagtggcagaatgttggctcatggcaaactccacttcctgggttcaagcaattctcgtgcctcagtctcctgagtagctgggattacaggcatgcgccaccatgcctagctaatttttttttttttttgagatggagtctcactctgtcgcccaggctggagtgcagtggtgtaatctcagctcactgcaacctccgcctcctgggttcacgccattctcctgcctcagcctcccgagtagctgggactacaggcacccgccaccacgcccggctgatttttttgtatttttagtagagatggggtttcaccgtgttagccaggatggtctcgatctcctgacctcatgatccgcccgcctcagcctcccaaagtgctgggattacaggcgtgagccaccgcgcccgacccaatttttgtatttttttgtagagacagggtttcaccatgttggccaggctggtctctaactcctagcctcaagtggtctgtccaccttggcctcgcaacgtgttgtattacaggtgtgagccactgtacccagcctacaatatgtttttgagtgagatttcatgggttgctttagtgcttatcaggtacatctcaaccaaatcttccttagatttgttactagttttatgccagtcacgcatagaaacattaccactatatggctctactttctcttcctcctttttatgctattattgttatacatattgtatctgttataattattagtataattttgtcttttatagaagggaaaagaaaggagagcaagtatacgtttatagtgttagatgacccttcttatttaccattttttgttctcttcattggttcctatggaatcctgttaccatctggtggtgtttccttagtttggtaaagctttgttcccacccaccactcttctgttactcacagatatatgacatttctatatgttataggtacaatagtacaattacgtacatattttgtgcagttttttaaaatcagctaagaaaacaaatacgcacatatgctgagttttaattagataattacttttactgacacccagatttttcatgtggacttgtgtggattcttaggtcactttccttcagccttaagaaattctgtgtgtatattttatcaggtgggtctgcaagcaataatcagtttttgtttatctaaaaatgtatttatcatgccttcatttttttggtggtggtgcttttcttaaggtgctttttttttttaaagcatctttagttttacagaaaaactgaaaggaaggtacagaggtatcccataattccctcccccacatatgcatagctttcctattatcaacatatcccccaccagaatggtatatttgttacagttgatgaacccgtgtatacacatctttcttacgcaaagtcactagtttctatcagggttaattcttggcgttgtatattctgtgagtttgaacaaatgtataaaaatatatgtctaccattatgtcatacagagcagtgacactgcactaaaaatcctctgtgctctgcctagtaatcattctctccaccctaatctctcgaaaccactgatctttttaccatctctatagttttgccttatccagaatgtcatacagttggaatcatatagtatggcttttttggagtgccttctttcacttagtaatatgtattgaactttcctccatgtcttttcatagcttgataacttatttcttttcagcactgaattatgttccattgtctggatataacactttatccattcatctaccaagagacatctgggttgcttctaggttttggcaattatgattgaaggtgctataaacatacatttggaagtttccgtgtggagataaactttcaactcctttgagtagataccaagcagagcaactattggattgtattggtaagagtatttttagttttataagaaactgccaaactgtcttccaaagtggctgtaacattttgcattcccaccagcaaaagagttcctgttgctccatattcttgtcagcatttggtggtgtcagtgttaggaattttagccattctagtaagtatgtcatgatatctcagtgttgtttaaatttgcatttctctggtaatatatgatgtggagcatcttttcttgtacttatttgccatctgtatctgtatcttctttggagagatatctgttaaggcttttggccaattattagtttctaaggtaaagcttagattattgattttgatcatttttcttttttaaagcagtcagatgtcatttagtgatcagaatacatcctgaagaaatgtgtcattattaggtgattttgtccttgtgcgaacatcatagagtgttcttactcaaacctaggtggtttagtctactacacacctacactatatggttaagcctatatctaggctgcaaacctttatagcattttactgtactggatactgtagacaattggaacacaaaggtagttatttatgtatctaagcatagaaaaggtacattataatatggcataaaagataaacagtggtatacatgtatagggcacttaccatgaatggagcttgtagaactgaaaggtgctctgggtgagtcagtgagtgagtgttgagtgaatgtgaaggcctaggacattaccatacactactatcaactttataaacatagtacacttagactacactaaacttatttttaaaaattttctttcttcaataataaattaatcttagcttactgtaacgtttttacttcttcttcatttttttcactttttgactctttagtaataccactttgtaatagctcttttgtaataacacttagcttaaaacataaacatattgttcagctgtacagaagtatttttttttgagagagagtctctgttgtccaggctggagtgcagtggcgtgatctcagcttatatattctgtcagcttttttctatttaaaaaatttttttaaacttttttttttttttttttttttattatactctaagttttagggtacatgtgcacattgtgcaggttagttacatatgtatacatgtgccatgctggtgcgctgcacccactaatgtgtcatctagcattaggtatatctcccaatgctatccctcccccctcccccgaccccaccacagtccccagagtgtgatattccccttcctgtgtccatgtgatctcattgttcaattcccacctatgagtgagaatatgcggtgtttggttttttgttcttgcgatagtttactgagaatgatggtttccaatttcatccatgtccctacaaaggatatgaactcatcattttttatggctgcatagtattccatggtgtatatgtgccacattttcttaatccagtctatcattgttggacatttgggttggttccaagtctttgctattgtgaatagtgccgcaataaacatacgtgtgcatgtgtctttatagcagcatgatttatactcatttgggtatatacccagtaatgggatggctgggtcaaatggtatttctagttctagatccctgaggaatcgccacactgacttccacaatggttgaactagtttacagtcccaccaacagtgtaaaagtgttcctatttctccgcatcctctccagcacctgttgtttcctgactttttaatgattgccattctaaatggtgtgagatgatatctcatagtggttttgatttgcatttctctgatggccagtgatgatgagcatttcttcatgtgttttttggctgcataaatgtcttcttttgagaagtgtctgttcatgtccttcgcccactttttgatggggttgtttgtttttttcttgtaaatttgtttgagttcattgtagattctggatattagccctttgtcagatgagtaggttgcaaaaattttctcccatgttgtaggttgcctgttcactctgatggtagtttcttttgctgtgcagaagctctttagtttaattagatcccatttgtcaattttgtcttttgttgccattgcttttgttaaaaactaaggcacagacacacacattagcctaggtctacacagggtcaggatcatcagtatcactgtcttccacctccgtatcttattccactgaaaggtcttcaggggcagtaacactcatggagctgtcatcttgtatgatatcagtgccttcttctggaatacctcctgaagggatctgcttgaggatcttgaggatgttttacagttaacttaagaaaaataagtgaaaggagcatactttattattattgttattatttttttagatggagtcttgctctgtaacccagtctggaatgcagtggtgcaatcttggctcactgcaacctcggcctcctgggttcaagcaattctcctgtctcagcctcccgagtagctgggattacaggcatgcaccactacacctggctaatttttttgtatttttagtagagacagggtttcaccatgttggccaggctggtctcaaactcctgacctcaggtgatccccacctcagcctcccaaagttctgggattacaggcatgagccaccacacctggccatggaatatacttcaaaataatgataaaaagtatagtatagtaaatacatagattagtaccatagtcattatcaaacacatacataattatatgtgctatagttttatacagctggcagcatacagtaagtctgtttacaacagcttcaccatgaacatgtgaaaaatgcattgcactataaggttacaactgccatgacatcattaggtaataggaatttcagctccattgtaatcttacaagaccagcgttgtatatgaggtgtgttcattgacaaaaacatcattatgtggcatgtgactgtatatgcgtttagtgctataaatttctcctctaagcattgctttcactacatcccacaaattttggtaagttgtgtattattttcatatagttgaaaacgtttataaatttctcatcagatttcttctttgacccatgtgtatttagaagtattttgtttagttttcacatattttgggatgttccatgtatctttctgttaattgatctttattttgatcttagagaagatgttatataatttctgtttttaaaaatttgttaacatgtattttatggcctagaatgttatctgttttgatgaatgttccatgtaatctagaggatatgtattctgctattgttggatgaagtggtctataaatgtcaattatatccagttgataggtggtgttattgtgttcaaatatatctttatggattttctgcctgctaaatctgtccatttctgtgagagatcttgaagtctcggattatgatagtggactaatttatttcactttgcagtttgtttttactttatgttaacactctgttgataggtatatacatgtaaaggattgttgtgtcttcttggacaattgaatcctttatcattgggtaatgcccctctttatccttgataactttccttgctttaagtgtattctgcctgaaattaataggctactcctgcttttctttggttaatgttagcatgatatatctttcttcaatccatttacttttagtttatatgtatctttacatatgaagtgagtttcttgtagacaacatgcagttggctcttgttttttattgcattttgacaatttgtcttttaattggtgtgttgacttttaaaatcatcattggtataattggattaatatctaccatatttgttactggtttctatttgttgttcttgtcctttgttcttatttttattttccactctttgagcattttatatgattctatttttttctcattttcttagtatatcccttacacttctttcttagcttttaaaatggttgccttagagtttgcagtatacatttacaactaatgcaagccaactttccaataacactgttacacatttacagataatgtggagtataatagcaaaattatcctaatttctccttctgttcctggcattcattttacttacatgtaagcatacataaatacatataagagcatacataattgaatacatgttgctgttactattttgaccaaaccattatctgttaggtcaattaagaataaaaaaataaaattttactgtctaatttattccttcatcagctcttcctttctttatgtagaactgaatttccgacctatattattttctttcttctgtagaacttcttttaatacttcttgcaaggcagtttttttggcaacaaagtgactcaatttttgttcatctgacaagatatttttccttcagttttgaagtatgattttactcactacagaattctagattggtaattttttttctcacaacagttcattctttgtttatgtggttttttgtttgtttgttttggtttctttttgaaatgggagtctcgttctcttgcccaggctggagtgcagtggtgcaatctcagcttactgcaacctccacctcccaggttcaagtgattctcttgcctcagcctcccgagtagctaggattacaggtgtgcaccaccatatctggctaatttttatatttttagtaaagacggggttttgccatggtggccaggctggtcttgaactcctggcctcaagtgatacacccacgtcggcctcccaaagtggggattacaggcgtgagccaccatgcccaggcctctcacaacagtttaaacatttcagtctactcttgcttgcactgtttctgagaagaagttgttatctttgcttctctgtaaataaggtgttttcacccccttcaacttccttcagaaatttgtttttgttagatttttctgtagttgaaaaatgatatgcctaagtttttgcttttttttttttaattctgcatttgtctagcttgctgttcttagtttctcggatctgtgtgtggtttggtgtgtaacagtaatttggggagattctcagtcattgttgtttcaaatatttctaatgtccctttttctctgcttctggtattcccattaagtgtacattttattatagttttcccacacttcttagatactctatttttttcagtctcttccctgtttgcttttcggttttggaggttagtagtagtccattgtatagatgtagcacattttaaaaatctgttcaccacttgttttatgtttggtgtttttacactttttggctgttatgaatactgttgctctgaaattgatccacaagtttttctgtgaacatactgttactgaaacaccaggggtttggtctaggtcctgttgcttgccgcacagaaagccagtgactgagacaaagagtattgccaaagaagaaggctttaattgggtgctatggctggggagatgggagctcagtcttaaatccctctccctgaccaactaaaattaggggtttaggtagcaggaaaaaatgtaacaatgtgtaacaaaacaggagctagggaggggcaaggaagcaatcatgatgaagcttccagcatctcattgtttggatgtggtgatctggtgaatttcagttctttgatattttttgagagcagaaggtcatttcctgaggaagaaactcagagcagaaggttgttccctgaggaaggaactcagataaatataagttttaagcttaaaataatttctatgtttgtattaaaaaactgtgggactgttggagttggtttcaatatgtgtgcagttctcttgtatatatacctagaagtcaaattgttagatcatgttatctttgtatttcactttttaaggaactgacatttttctctgaagtggctgcactgttctgcattcccactagaaatgtttgagggtctgcagtttctccatattcttatcaacacagcccttcacctcacttttcattatagcattctaagtgggtgtggaatggtatcttttttgttttgatttgcatttctctaatggctaaggatattttcatgtgcttattggccatttgtatatgttctttggagaaacgtctatttaaattctttgcccatttttcaattggcttgtgtgtgtgtgttttgtttggttttgcttcttttttgagacagagtcttgctctatcacccaggctggagtgcaggggtctgatgataacttacgacagcctcgacctcctgggttcaacctgaccttccacctctgcctcctgagtaactgggactacagaggggcctaccaccacctctggctaattgtttaatttttttgtagagacaaggttctgctgtgttgcccaggcttgtcttgaacttctggactcaagtgatcttcctgcctcagcctcccaaagtgctgggattataagcatgagccaccacacctggcctttatttgtgtttttattattgacttgtcagagttccgtatgtattcggtgtacaagtctttttttttcccagatgtatgatttgtaaatattttttcccatcattgggttttattttcacctccttaataccatctttttttccataaaagtttttgtttttagtatgtttttggttgctgctgctttttgtgtcacatgtaagaaaccattgtttaaaaaaaaaaaaaaaggtcatgaagatttatacctgtgttttcttctaagatctttatagtttcagcttttcaattaggtgtatggtccgttttgaattaacttttttggtagtgtgttaggtaggtgtccagatttattactttgcatgtgaatattcagctgttgtagcaccatgttttaagcagagtgttcttttagtatttcaaggtcatggcacccttgtgaaaaattagtttactgtaggtgtataggtttatttctggattttctattcagttccattggtctatatgtctatcctcatgtcagtttcaccttaccttaattaatgtaattttataataggttttaaaattggaaagtgagagtcctataactttgatttctttttcaaggttgttttggttcttcttattcttttgtgtctctatatgaagtttagagtaagcttttccatttctgtactcttatccccagcctgtaggtctcttgcctgtccctttcctggtggtggtgtgtgggaggccacaggtgcattccaaatggaaagagattacattcttgtaatgatctagtggtaagcttggcctgaagatttcaagatgggacatggttaaaagatatgttgttctacttttatggtatgaaattccccatataaatttaacatgaccagaaagtttgaaattgtcaaatgaaacacaataactacctttgagagagtcattggaagtttgtattcgtatatattacagtggaagatgcagcatcattagtaatgattgaaccagcattaaataaatggcattaatgaactgcagcagatatatgttgtttcaatactaacatgtcatgggagccatggcattgtgagcaatactagtgttgttgcctttttcttgggtgaaagttaggaaatcagccaggaaaagcagatagaacaatgaagaacttagagatggtgcctggacactttgaagaaagttcttgtgcatgattgaacaataaataaatacttaagagtatctattttctatctaatgttctaaaactttattgaaaaatcattctagtgtccattggcccatcattttgtaatatactttaaaatcaaattatttatacataaagaggcctcacaaaaaattatttgcccagggcttccacgtatcctaagggtagtcctgctcaaatttatgttagtagataccatcccagctgttgtgggggggtcagccttgacgtctttcagcctaaatggcttaatgtaggtgagaatagggaattacttttaagagtaaaggacaaaatgaataaaatcaattgagcttgcattgttgtagtttagataaaagtactacttagagtgaaccttcatgagcaagaggtcactattaactagatctttgaatttgtcttagtacaactgctcagagggattttaaatatttaacatttccgttttaaatatcatctttcagaaatgattcaccattcaagaattaagatttaacacagaatcatgggattagatttttggaagtttagcgattttctgccttttttagaaaaaacaaactgaaaatgttctaggttgtgctttgataagattgccccttctgtttaatttactgtgtttctactgagaacgaatttactatgatcctactatttttctatggagaactaacctaacatgctcctattaaaaactaattccccatgtgtgtgtgattgtagccagagaaaaatatttgaagatgaaaatttatttaccattctttttatgtaattaacctatatcttaataatttccatgtttttttcgcttacctggagaagatcagtagatgagagtgaactaagtactggggcttgtgaaaatgggtatttatttaaaaaacccacaagataaggatattctttgcatttagaggactgtttagagtgaaaaggaaaactcacttttttatttaaaacaaaaactttaagctgaatacatgttgagcataacataactgtttacaatcttttttttttttttttttgaggtggagtctcgcactgtcgcctggactggagtgcaatggtgtgatctcggctcactgcaacctttgcctcccaggttcaagcaagtctcctgcctcagcctcccaagtagctgggattataggcacccaccaccacagctgcctaattttttgtatttttagtatagacggggtttcactatgttgggcaggctggtctggaactcatgacctcgtgatccacctgcctcggcctcccaaactgctgggattacaggcgtgagccaccgcgcctggactgtttacattcttctattgctgctttcatttctatccataagtgtaaatgtagtctttccataaatgtattatagatgtagtataattttgtggggcttttccagtttttcatgtttattatttttagtggctgttatgattttatattatgccttctttcttcaccttccaagtagatgaagtttctaacacaaaagaggttatgggctttatcaataaatgtgtgctttaggggcattttgtcctttatggctacgagttcccaaggggagatataaccgtgggactcgaagtttaagttcggtttctggctttttctcaacacgtacaataaacgtgaataggccaggtgcagtggctcatgcttgtaatcccagcactttgggaggccgaggtgggtagatcacttgaggtcaggagtttgagatgaggctggctaacatggcgaaaccccgtctctactaaaaatacaaaaactgtctggacatggtggcaccctgtagtctcagctactcaggagtctgaggtgggagaatcacttgaacccaggaggcgaaggttgcagtgagccgacattgcgccactgcactccagtctgggtgacagagtgagaccgtgtgtgaaaaaacaaaacaacaacaaccaaaaaaaccccaaaaatccttggagtgtctttgttgcgtaattaggtggagatctctgaaggttcatcactagaaataccaaacacatgtttagaaggctgggccttcagccacctgaactctagggaggtcactgatgtaatcaatcattcctgcataatgaaacttaaaattctggatactaaagctcagtggctcttcctggttagcaaacacatcagtgtctggagactgatgcatcctggctccacatcatggagttaggagaggttatggaagctctgtgtctgggaccttcccaaacctcaccctgtgtgtatcttttatagttaaactagttgtaagtgtagcacttttcctgagttctatgagttgtagtgaattattaaacctgaatggactgtgggagcccctctgtagccagtcagcttgggggggatgcccgttcctgagactgacatatcagaagtgagggcagccttgtggaggactttacccttcacctgtggggtctgtgctaactcaggtagttaatgtcagaattgaattgcagtacactcagttggcattagaaaaattggagttgaaacagtgtactgatagataacctttcctgacatatttgtctatgccatttaattttcacagcaaggctatgaggtagtatgatattccctttccatatgtaagaatatgttcttaaaaatgtctcatagcagaagaatttctgtgtaagtaacttaaaacctatgggaagaataataccagcaggactttggttgcaggtcagggcctttagagataaataaacatgcatggtttttgtttgtttaaaaaaaaaattgggaactaaaaagtattccacacatttaaattagtaataataggttagtaaatactaaattccattttctgttccattttcaattttttttctcagtttaatgttttactttgttgcagataattcttatgcaaaacagaacttttttttccctacacctggatctccacccctgtgtttgctgttgtctaagttttacattgttgatacccacttcctaagttttggtttccagagccactagtaacatttgtcgctcatggtggaaaaacatatgggaatattcctgtgtgcatccaggagcatttttcagattcctttgctagacctttattgccatctattataacttctcatcacagcacatagaaagcagcagcactatctggcttggcattctcagcagctcctacagaatcttcccctctgcagtccctgccaaaaccacacaggacgtgtttctcggagttgcgcatggagaataccaccaatgtatttgctgcagctctgccttctatcgggcttttttccattcttcacctttttattactatttctagcgatctcgaaaaagatattttatgtgaaattgtgtatttaaggaaactgttaaagaagtctaactatttgtactaagatttagtatgggaggaggattttgtctagtttgggagacatttccatttgtttatcgtcatatggaattgtctgaattttagagctgggaaagcagcctagggcaggcctgacctcctgcatgggctcccccatgccgccctacctgtttagttgtcatgggaacacaaggcagattctcttcctcatatttctcacccatcttctattgtactttcaaaggtctttttttttttttttttttttttttttgagatggagtcttgctctgtcacccaggctggagtgcagtggtgaggtcttggcccactgcagcctccgcctcccggattcaagtgattctcccacctcaggctcccgagtagctaggattagaagtgcacgccaccacacccggctaatttttgtatttttcatagagaagtggtttcaccatgttggccaggttggtttcgaactcttgacctcaggtgatccacctgcctcgtcctcccgaagttctgggattacaggtatgatcaagtgcacccggcctgaaatgtcttattttttatatttataaaggtagcttttagcacacattgtacactcctttcttattatttcctttcttatcgacgctggtgtttaaatatttatgtacctttagtgcagatacctctcttggctaccctttctttctgactttaggctgtactgtattaatagagtcactgggagcattttcccaacatgttcttaaaaccagactagtcatatttatgagcagatatttcagaatatgtacataatttataaaaacaaatctcccagtcgcatctagggttctgtttgattggaaattgttgagacacacactctccaagctcattatctagctgttctaactttattatactagtaaattaatattgtgtttaggtggatgtcatatcatccatgttaactcttaggagaagttttgaagattgtagccttgttttgtttattgatggtattttttcttttttaaatacccaataaaaattctagtgtttgagaatacagagtgcctttaatataaaacatttatttggaatataaaaatctgattgacagtattaaaattaagatgcaaaataggaaaacaaagattccctttatctgtaccatttttgacatcaggtatctgaaagctggacttttgtgttaggggagagactcgagtctcttctttaggttaatatttctcattcccagtacctagcatagaggttgacatgtgctagatactcactaaatgtttgctgaatcaatgaactaatgaagtggagggtgtgaaacagggtcactgtgcactggttaccaacttgtccaagttcagtgagacagaacttacgggaagctgctttattacttacagacaggtagtgagggccagaagaagcctgaggatttcttgtgcgccagtctctcaaagctgaggaaagctgcctggggtggatggagtctcatctgcgtgtgcttcactttcaacacagctgcaggacctcagaaagcagcgtgacatgggttttatactctaggggccacagaactgatgggctaaagtgtggaaggacatcctgtttcgggcagggatttaaacagaacctgggcttctcctgccagtccttccctttctcaggatgtttcattcccagaagtttctacagttaattcttaagaatacagggaggatcagggagaactgggtccatccaaggtcacctggagaattgtccttcgggggggaaaagaaaatgcttgtaggacattcttacgtatttaatcttctgtggcagactctactgggccattttatgtattttgttggctttttctttttttttttattattattatacgtcaagttctagggtacatgtgcacaacgtgaaggtttgttacatgtgtatacatgtgccatgttggtgtgctgcacccattaactcgtcatctacattaggtatttctccgaatgctatccctaccccctccccccaccccacgacaagtcccggtgtgtgatattccccacgctgtgtccaagtgttctcattgttcaattcccacctatgagtgagaacatgcggtgtttggttttctgtccttgcgatagtttgttcagaatgatggtttccaccttcatccatgtccctacaaaggacatgaactcatccttttttatggctgcatggtattccatggtgtatatgtgccacattttcttaatccagtctatcattgttggacatttgggttggttccaagtctttgctattgtgaatagtgccgcagtaaacatccgtgtgtatgtgtctttataatagcatgatttataatcctttgggtatatacccagtaatgggatggctgggtcaaatggtatttctagttctagatccttgaggaatcaccacactgtcttccacagtggttgaaccagtttacagtctcaccaacggtgtaaaagcattcctatctctccacatcctctccagcatctgttgtttcctgactttttaatgattgccattctcactggtgtgagatggtatctcattgtggttttgatttgtatttctctgatggccagtgatgatgagcattttttcatgtgtctgttgctgcataagtgtcttcttttgagaagtgtctgttcatgtcctttgcccactttttgatggggctgtttgattttttcttgtaaatttgtttaagctctttgtagattctggatattagccctttttcagatggatagattgcaaaaattttctcccattctataggttgcctgttcactctgatggtagtttcttttgctgtgcagagctctttaattagatcccatttgtcaattttggcttttgttgccattgcttttggtgttttagacatgaagtccttgcccatgcctatgtcctgaatggtattgcctaggttttcttctagggtttttatggtttcaggtctaacatttaagtctttaatccatcttgaaataatttttatataaggtgtaaggaagggatccagtttcagctttctacatatggctagccagttttcccagcaccatttattaaatagggaatcctttccccatttcttgtttttgtcagatttgtcaaagatcacatggttatagatgtgtggtattatttctgagggctctgttttgttccataggtctatatctctgttttggtaccagtaccatgctgttttggttactgtagccttgtagtatagtttgaagtcaggtagtgtgatgcctccagctttgttcttttggcttaggattgacttggcaatgcgggctctttttcggttccatatgaacgctaaaacactttttttcaattctgtgaagaaagtcattggtagcttgttggggatggcattgaatctataaattaccttgggcattatggccatttttacgatactgattcttcctatccatgagcatggaatgttcttgcatttgtttgtgtcctcttttatttcattgagcagtggtttgtagttctccttgaagaggtccttcaaatcccttgtaagttggattgctaggtattttattctctttgaagcaattgtgaatgggagttcactcatgatttggctgtctgtttgtctcttattggtgtataggaatgcttgtgatttttgcacattgattttgtatcccgagactttgctgaagttacttaccagtttaaggagatttggggttgagacgatggggttttctaaatatacaatgatgtcatctgcaaacagggacagtttgacttcctcttttcctaattgaaaaccctttatttctttctcttgcctgattgccgtggccagaatttctaacactatgttgaatacatgtggtgagagagggcatgcctgtcttgtgccagttttcaaagggaatgcttctagtttttgcccattcagcatgacattggctgtgggtttgtcataaatagctcttattattttgagatacagtccatcaatacctagtttattgagagtttttagcatgaagtactgttgaattttgtcaaaggccttttctgcatctattgagataatcatgtggtttttgtcgttggttctgtttatgtgatggattacgtttattgatttgcgtatattgaatgaagcagccttgcatcccagggatgaagccgacttgttcgtggtggatacgttttttcatgtgctgctgcattcagtttgccaatatttaattgtggatttttgcattgatgttcatcaggatgttggtctaaaactctctttttttgatgtgtctctgccaggctttggtatcacgatgatgctggcctcataaaatgaattagggaggattccctctttttctattgattgaaatagtttcagaaggaatggtgccagctcctctttgtacctctggtagaatttggttgtgaatctgtctggtcctggactttttttgcttggtaggctattgtctcaatttcagaacctgttattggtctattcagagatttaacttcttcctggtttagtcttgggagggtgtatgtttgcaggaatttacccatttcttctagattttctagtttatttgcgtagaggtgtttatagtattctctgatggtagtttgtatttctgtgggattggtggtgatatcccctttatcattttttattgcatctatttgattcttctctcttttcttcttagtctctctagtggtctattttgctgatcttttcaaaaaaacagcccctggattcattgattttttgaagggtttttttgtgtctctgtctccttcagttctgctctgatcttagttatttcttgccttctgctagcttttgaaggtgtttgctcttgctgctctagttctgttaattgtgatgttagggtgtcgattttagatctttcctcttgtgggcatttagagctataaatttccctctacacactgctttaaatgtgtcccagagattctggtatgttgtgtctttgttctcactggtttcaaagaacacctttatttttgccttcattttgttatttacccagtagtcattcaggagcaggttgttcagtttccatgtagttgagcagttttgagtgagtttcttaatcctgagatctaacttgattgcactgtggtctgagagacagtttgttatgatttctgttcttttacatttgctgcggagtgctttacttccgactatgtggtgaattttggaataagtgtgatgtggtgctgagaagaatgtattttctgttgattttgggtggagagttctgtagatgtctattaggtccactaggtgcagagctgagttcaattcctggatatccttgttaactttctgtctcgttgatctgtctaatattgacagtggggtgttaaagtctcccattattattgtgtagtaggagtctttaagtctctttgtagatctgtaaggacttgctttatgaatctgggtgcttctttattgggtgcatacatatttaggatagttagctcttcttgttgatccctttaccattatgtaatggccttctttgtctcttttgatctttgttggtttaaagtctgttttatcagactaggattgcaacccctgcttttttttgtttgttttccgtttgcttggtagatcttcctccgttcctttgttttgagcctatgtgtgtctttgcaggtgagttgggtctcctgaatacagcacactgatgggtcctggctctatccaatttgctcgtctgtgtcttttaattggggcatttagcccatttacatttaaatttaatattgttaggtgtgaatttgatcccgtcattatgatgttagctggttattttgctcgttatttgatgcagtttcttcctagcctcgatggtctttacaatttggcatgtttttgcagtggctggtactggttgttccttttcatgtttagtgcttccttcaggagttcttttagggcaggcctggtggtgacaaactctctcagcatttgcttttctataaaggattttatttctccttcacttttgaagcttagtttggctggatgtgaaattctgggttgaaaattcttttctttaagaatgttgaatattggcccccactctcttctgacttgcagagtgtctgccgagatatcctctgttagtctgatgggcttccctttgtgcgtaacctgacctttctctctggctgcccttaacattttttccttcatttcaaccttggtgaatctgacaattatgtgtcttggagttgctcttctcgaggagtatctttgtgtcgttctctgtattttctgattttgaatgttgacctgccttgcgaagttggggaagttttcctggataatggataatatgctgaagagtgttttccatcttggttccattctccctgtaactttcaggtacaccaatcaaacatagatttagtgttttcacatagtctcatatttcttggagggtttgttcgtttctttttactcttttttctctaaacttctcttttcgcttcatttcattcatttgatcttcagtcatctgtcttccacttcaatgaatcggctgctgaagcttgtgcatgcgtcacgtagttctcgtgccgtggctttcagctccatcagttcatttaaggtcttctctgcgctatttatcctagttagccatttgtctaatcttttttcaacgtttttagcttccttacgatgggtttaaacatcctcctttagctttgagaagtttgttattaccgatattctgaagcctacttctgtcaacttgtcaaagtcattctccgtccagctttatttgattgctggtgaggagctgcgatcctttggaggggaagaggccctctggtttttagaattttcagcttttctgctctggtttctccccaactttgtggttttatctacctttggtctttgatgatggtgacctacagatggggttttagtgtggatgtcctttttgttgatgttgatgctattcctgtctctttgttggttttccttctaacaggaccctcagctgcaggtctgttgaagtttgttggaggtccactccagaccctgtttgcctggggatcaccagtggaggctgcagaacagcaaatattgcagaacagcaaatgttgctgcctgatccttcctctgggagcttcgtctcagaggggcacccggctgtatgaggtgtcagtcagcccctactgggagatgtctcccagttaggctgcttgggggtcagggacccccttgaggaggcagtgtgtctgttctcagatctcaaactccattctaggagaaccactgctttcttcaaagctgtcagacagggatgtttaagtctgcagaagtttctgctgccttttgttcagctatgccctgcccccagaggtggaggctacagaggcaggcaggcttgttgagctgcagtgggctccagccagttcgagcttcctggccagtttgtttacctactgaagcctcagcaatggcagtcgcacctcccccagcatcgctgccacctcgcagttctatctcggactgctgtgctaccagtgagcaagggtccgtgggcgtgggacccactgagcccggcgcgggatgtaatgtcctggtgtgctgtttgctaagaccattggaaaagcgcagtattagggcgggagtgtcccgattttccagggaccatctgtcatggcttcccttggctaggaaagggaattccctgaccctttgtgcttcctgggtgaggcgatgccccgccctgcttcggctcacactccgtgggctgcacccactgtccaaccagtcccagtgagatgaacccggtacctcctttggaaatgcagaaatcacccgtcttctgcgtcgctcatgctgggagctttagactggagctgttcctattcagccatcttggaatgatcgggtttttcttaataatccaacaaatttgctgttattgtaatccccattttaatgaaatttgtatgaatggaattatgtaaattataacaaagaatatttgcagattcccaagaaaatgctctgagcagctctgagtgtgattgctaagattagcgattttaaacctttttttccttgacacgtgaaagatgacacttgttataatttatgtgtcataaataaaagatagagtctcgctctgtcacccatgctgaagtacagtggcgcaatctcggcccactgcaacctctacctcctgggttcaagcgattcttctgccttagcctcccacttagctgggattacaggcgtgtgccaccatgcctggctaacttttgtatttttagtagagatggggtttcaccatgttgtccaggttggtcttgaactcttgacattaagtgatctgcctgcctcggcctcccaaagtgctggggttacaggcgtgtgccactgtgcctggcctaatttcttaaataaaggagcaaatgtaaaccttatagtactttattattttgcgaccatatctaacatcttttcctagctgttgaccacagccctcatcatactatggtcaagaatggctggcttaaatgaaagtttaaatttgaaagcagtactataacatttgagaaacaacttctgtgtgatacacagtaatcccccctttatccacagtttggttttctgaggccttagttacttgtgatcagccataatctgaaagtattaaatggaaaattctaggagtgattaattttagagcacacccacaccattctcaactgcatgatgaaatctcttgtcaccccattctgtctcatctgggacatgaatcccctgttttgtcccacctgtccatcctgtagatgctcctgcctgttagtctcttcgtagctggtctgttatcagattgactatcacaacatctcagtgctgtgttcacgtcactcttactttacttaatagtgaccccaaaatgcaagaatagtaatgctggcatgttgttacaatcgttctattattatgttgttaatctctttactgtgtctgatttataaattaagcttcatcataggcatgtattcatgggaaaatctatggtgaatatagcgtttggtgctatccatgttttcagacatccactgggggtcttgaaacatatcctctcagaattgattattattttgaggtcccatgttttaaaagcagtgtgaagaaggtaggtgagttcagaaaggaaactgagttgggttttgaagaccgagtgggatttaccacatttaaagtagaaaatgtggtaaagagctgggatgaaacaggtgtgtttaatactcattgcaggctggagtatgggaccatagggtggggaagatgatacctagaacttaactttttgaacacaagttaaacaaaatgatgtcttaattttgaaagcataacttttaaagtacagttagccctccatatccatgggatatgtggattcaatcaaccatggaccaaaaatatttggaaagacaaattctacaaagttccaaaaaacaaaacttgattttgccacattgagtactacactgaatgaagtgatacgtaggcattgtgttaggcattataactagtctagagatgaattaaagtatacaggaggatgtatataatgttatattcaaatactacatcattttagatcaggaacttgagcatccttggattttcttgtcatcggagtgagcaggtcctagaagcaatcccctatgcttactgagggataactgtatattataattttgaaagaacagatgttcaggatcctttaaacattttactgtgttagaggataatttgggctgggcgcagtggctcacgcctgtaatcccagcactttgggaggccgagacaggtggatcacgaggtcaagagatcgagactatcctggccaacttgatgaaaccccgtctctactaaaaatacaaaaattatccgggcgtgatggtgcgtgcctgtaatcccagctactcgggaggctgaggcaggagaatcacttgaacccgggaggcggaggtcgcagtgagccaagatcgcgctactacactccagcctggtgacagagccagactccatctcaacaaaaaaaaaaaaaagaaagaaagaaaataatttgaccgtgtacttcttgttttcatctggagtctaggctgtaaaatataaacattacagttaaaggctttatatgtctatgtgtcttagcctagacattggatatgtgttgctatgggatgagagatctgatttattttagccactagcagtaaatgtggtgaaaaattaagactgaaaactacaatgttgaggggtgaaaggaagggctaaacatttttcattgtggtggattctgccagcgtagactgctaaatgtttgtggtttggatcttgttcactctgaacgctttaggccttgtgtaggttttccccagagtatgaggtggttgtgaactgcttttgctaatggtgagaatgaactatcatgatgttatataacaaggatggcattctgggagacgcaaaatttaaagtaggggaaaaggaggatggcaaaaactaagtaaagtaacttgaaaagttattctttctgccaggcgtggtggctcacgcctgtaatctcaatgctttggtaggccgagtcgatgaggttgagagatcgagaccatcctggccaacgtggtgaaaccccatctctactaaaaatacaaaaattagctgggcgtggtggcatgcacttgtagtcccagctacttgggaggctgaggcaggagaattgcttgaacccaggaggcaaaggttgcagtgagccaagatcatgccactgcactccagccaggcgacagagcgggactctatctcaaaaaaaaaaaaaaaaaaaaaaaagttattctttccaaatatgatacaattttgttcaacttaattttgttaaatttttattcaaaaagttaagttctaaatagcatcaaacatggtgggagtcaaaataattaaaatcgtattttttctgaaagtgtgtagactgcctgcatacttatatatacgccagattgtattttacttaccttctcatttgcatcttacccttgtggccgaattagcaggacctgtgtgagaatgacataacttcaccgcctcttacctgctccagctgcaacgcgtgagagtgctgaactgtggcctagatttttctctagggctttccacggaagtgagtcaacacattgtttctggcttttcttgctgtccctccctaatatgcaagcttaggttgctttggaattttccaggtacagtgttggagaagttgtaacacaggaggaggccagagcgtaggtttagtgtggtggggagagggttggagcaattgttcaagggaagattgaaagtgaccaaaatggcatgagggtaaaaatgttacctgaattaaatatgtaccaaacactgaaaatcccttattatattttagtatcttttatcattgtattttaaaattgatttaaatctatactgagattttttttttttttttagtgtggatttcaacacattttttgtgcttttgccaagaacacagtgttctgttaagtcattcagtgacgaagattgctggattgctgccagcccgggtcaagttcattcacataagtttcagtgtagattctgactgagtgaggaatgttcctcttgtctttgcatgttaggtgggtctgggaaatcagttgttttaaaacaagcttattaatacttttgtttttttcagggttatggggtttttttgcttttaaggcttcatatacagacaacgctttgatactagtatcacattcttgtctatttactgattttccatgcctgatttggtgaaataacagctctcctaaccataccagattagaatctaccgtataacgtattgactctgctgtatcattttaaggtattattttatatctttaaagaaaatatattcacaaagtgcctttctcaatcatatatgtgaattaaaaagttgggaaaggtgacttagaagctacaaaaatatagtgtttgataaggtgtatatacctatgaagatatattcatgtttatgtattttattccttcactcatagttcttcctcagtttctttatttcgtttgccatcttttttttttttcagccacagaagtgcatttttttgcattaaaaatgcaaccagtatacaaaaagctaaggattggagcttattgatcactcatttggcacttatcagttttgcctgagaattacgcatatttaaataattttttttaaaaaatttgatttctgagtgaacaaacatattctgccttacaactagcttacaagacgttcagatgctaatgttttttctgttcattgtagtatttaaccaaggtaataaatttatgtttatactgatgactgttttcatttatttattttaaattttttatttttttttagaaacagggtctcactctgttgcccaggctgaagtgcagtgatgcagtcatagcacactgcagtcttgaattcttgggctcaggtgatcctcctgcctcagcctcttgagtagctgggactgtaggcacgtaccaccatgcctggctaattttgaaattttttgtagagatggtggtcttgctgtgttgcccaggctgctctcaaactcctggactcaaatgatcctcctgcctcggcctcccagagtgttgggattacaggcatgagctaccacaccaagccctaatgaaggttttttgtttttcttttcttgagctggagtttcacttttgtcacccaggctggagtgcagtgaagcgatctcggctcactgcaacctctgcttccccagttcaagtgattctcctgcctcagcctcttgagtagctcggattacaggcacccgccaccacgcctaaataatttttgtattttaagtaaagacagggtttcagcacattggccagctggtcactaaactcctggcctcaggtggtccacccaccttggcctcccaaagtgctgggattacaggcgtgagccaccatgcctggccgatgaaggttttttgtaaaaaaaaaaaaaaaaaaaaatactgccttagtatctgttggaatgtgtgattttttttttttttgctcatgtctggtaattagcatttttgtgatcattcattatgtccgtattcattaatgcctttctagaatctgatagaatgcctagcctacagttgctcaccaggtacttaaaacctgaacagtgaatgcgtaacaaccacagctcagatttgcggtaacggagcatttatgtctgggaacctatttgatatcacacatacatgaaaaataagtgaagcaaataaatcacaagcatatgtttttacagacatagattaagtatttaaaaccaaacattatcagaaagctatattataaccattcctttgggacatttttctgcatgggttacattggctgggctactttaatcagagtccagtgaagttcgaatggaagttacatgttttcccattaaatcttcctttgacaaaaatatttattcattgttcttccaaggacctctaaacactattaaatattttttaaatgtagattgaatgtgcatagatttctcagaaaaccttttcctgttaaattccggaaggagtttactgcttcctcccacttccccgtggtggctcttttgcagttgttagtcaagagctgggcttgggtatcacatcacaatagtgccaagagccttggcatagctcttggtaatcattgccttatttacctctctccccaaataggctgcaggttccttgagggccaggatcatcatgaatgagtgagtgaatgaatgaatgtagcagacacaacacatgtggacaagtagtggcagggactaaaactggtggcaaagacttgtatgctcatgagctaatgattgaaatacctgtatctgtgataacagcgtaatagatacaactgtttaaacattaagtcctcgtgaaaatagaattggtgatattatactttttggtttatacttattcccttaaatttctctacttttatgaaacagttttactcctgaaatgaaggtgatgggataaagttaagggatcagagtcgctgtcttgggagcataatttctcattcagtgaaggccccctcagagtgctcatcaatatcgacgcattcctgtgggagctgagagtatttaaccaaatatgtctcctgatataatcaaaatttgcaaccatgggaagaattaagtggagaaagattctgcacttaattaggaaaaatagttaaagaaaggagtgtctaatgatcacatggcttggtcatttgaaaacctattaccaggattatatacgatagttaaattttaagtagactgctcattaacaaagctgaagtgtcccatgggttgactatgtggctatgattgtataacttatatttccagaagaaattttagtggaaaacatgattgcacagacagcacatttgcagtgggtggtagcaggggatagggggtggtttgcatctgttacctaaagtaagaccagtatgaacataaagtcctagaaaaatttggatactgaactttggtttttaaaatgcgtacagtaaatgaagctgctgttctgtgagcacctacctaccatgtggggtgctgcagaatctattttacacatattttctcactcagtttcctcaatgaccctgttgaaatggggtttattttgcatatggggtaacttggctgtgtctcaaataaattaaaaagttgcctagcattacttgccaggaaggggcagaatgagaacaaccaagggaatcttagaattagatcataagagaagaatcccattgtgttctactagtcagtttaagttgagtgcttgtgtaacatattttcttaaataggtaggaaattaggggaaagagtgtgaatttattggctaggcttataagagaacagataagatttctatgctagcctgcttcttgttcatcttttactaagagtctggcatccaaatttctggaccttggcacactttggtatttggtatgaagaaaggaaaatcattccacctggttcccatgtcccgacacccacgccataactacctgtcagaactcgctctgcttatctgtcctgcgtgggagatggcagcactctgccctgctcagtgtatgtctcgtggttacttgagacatccaccaggcttagctctaggatatctgcccgaagaaaagatggagtggaggggcttagatggccaagagaagaaattcgctcaaatcaaacttctttatttatcttatttttcgtccatcgttttactctggttatgggttacattctttctgtggtatgatggagcaaggtagcatttattttcctcaccatataatttttggttcttttgtttcaattgaattgaacttctaagaaggcaagcacaatgagcatagtactcatttccataaatatgtgcttttgttttgtttttcacttttaagaaagaaatttgaagtgtggaagttggagttctgaaaaaaaattagggaaggaaatggagaggatataaggagaaaggaaaggagatctcatacatgttaatcgtctagtgtttaaggccacatgaaggtcagtaaatgatactggagagcattaaataagaagtactcacctgtgatttcagcaggcttgcatgtagtcacgaatatatgtgtggtttacattcactctggcagtctttcctctccaacctggtgagaattagcatccttgttttccagacctgttaaccagtaaatgactgttcggcagactattttattttttatttttgtttgcatattcatttgttttaggtctcgctctgttgcccacagtggagtgcagtggctgttcacaggtgtgatcatggctcactgcagccttgaactcctcctgggctcaaggaatcctctagcctcagcctcctgattagctgggactacagacatggcacaccaccgtagctaatttttataaaaagttttatagagatagagtttcactatgttgccccagctggtctcaaactcctgggcacaagtgattctaccgcctcagcctcctgagttgctaggatcacagatgtgagcctccttgcctggtcatttattttttttaatttttaaagaaataaatattgagagattatcttatttttttctcaaataccttatgttagaaatgataaatttacaatgtatactcacttctgagtttggcctgttttcctgaggtgtcagaagacaggatctaacactagattttaagattaaggtttgaggctaagatctctctacagctttcccacaacaatcttgtgaagaagaaatgatgaactcaagccatgtcatttctccctgttgctatttctaaacatggcatggcattggcttggattgtctcattaaaatttgttttgcagttcaattgcattatctgatccctatattacttcagtagcagaattttaaacattttatgtccattttctgcttttatgggctttagtcctgcccattggtatttacatttaggaagttaggacgtaggatacatatatacagacatactcctcccacccattgcagcacaaataaatctcaattgatttttctctctattaataaaataacctgtgatcacataaatttctggtagtctctaggtggaggcaattggagttaacatttttgtacagtttgttttcatgttaagacactaactctagcatgactaggatttcagagacatctgtttataggattgagcacagagatctgattccctcccaccagttaaaaaaattgttaaaaaaaaaagtttttttttacgggcgcctgtagtcccagctactcgggaggctgaggcaggagaatggcgtgaacccgggaagcggagcttgcagtgagccgagattgcgccactgcagtccgcagtccggcctgggcgacagagcgagactccgtctcaaaaaaaaaaaaaaaagtttttttttaacaaattttgtatagtgttgttttataatatccaccttggcacattcgatgaaagtttcaaacttcgaacttctcttttttggaaagcaccatgggtcaagggccctgtttgtttaggagtcctgggtcccctttgtgtgtcagagcatgcaaaggaacctggaacagcctttcttctgggctgtcctcaaaggggcaaaaaggaaaaaagagttgatgaatgcaagatagtgattttatgagtcaccttttctgcagtgacatgcatgggtagaggatgaatttgtttaaattcttttttcccatatttctagaaaatcaattaactacaggtagatgttaaatgagattttgatcactcagcattgtgccctatagagtttgtgattattctatagcgggtagagagcatcctgtctctgaagaaagtatagtccttgtttctgtgtgttatgattgttttttgactcaagaatatatcataattagtggttttcattttggaatgtgctgccagcctctttctcttaaaaaatgggatacttcgtaagaacaagctatgatactgtgataagtattggcttccatgctgtattttctacatatgtatgcatgtatgtcaaagtgtttgaaagagcctggaacaatttatcactctctctcattgaaatagagggactgggctgggtgcagtggctcacgcctgtaatcccagtgctttgggaggccgaggcgggcggatcacaaggtcaggagattgagaccatcctggctaacatgatgaaagcccatctctactaaaaatacaaaaaattagctgggcgtggtggcgggcgcctgtagtcccagctactcgggaggctgaggcaggacaatggcatgaacccgggaggcggaggttgcagtgagcggagatcgcgccactgtgctccagcctgggcaacaacagaatgagactccatctcaaaaaaaaaaaaaaaaaaaaaaaaaaagaaatagagggactgcctttccctggagagaggcaacaagaatcaggctcttcgtctaattgctgtgtggttagtgaattttctactatttctcggtagtccctaagtagccaaactgtatcattcttctgttttaatttggtaagccaggagaaattaattttgctcaagttgtttgtcattgatctattttaactatattacagaataagctccagggcaggagcctatgactgcctgtggaccaggcaggtggtgaaaacccgtaggcttagagggctctgtttgactggagaggctgccatggctgagcaccggggctgttggtaaactccagccagctacgtgtgccttgaaaggatgtgattccagcgttgtcaggtcttctcagttttaagagagctggctgttgtccagataagtatgtgaaatctcccactttctacatgttggcagctagttcaaatgaaaaacaaaacaaaacaaaaaacagaagtgaaaaagtctgtggggcaaaaatttgtctactggtcaccagtttgtgtccagtgcttgaaggtatctggtggtgttttcagccttcttcttggacgtgctggaccacagacactgctttggtgctgtttgtgttcatggtaggataagactttgattcaaccagtacttctggagtgtatggtgagcattcacatattatttcacacttttaaaaaatgctcatgattttttaatattaaaaataaataagtgatgctgataaaagtgtaaaaaatgttcaactgataaatggattacatgaccacagttacttaaaagaaggtagcaaaagtcccagtgctgtgatctcaggtacctctgacctcagttttatcatctgtaaattggaaatggtaatacctacttctagaacttgtggtgatgttcatatggagcatcaggaggaggaaaactgcattgtcagccacaaggcagtgcatgaatttatcatgggaataaatcattaatttttataagaattcagttgagccttccatccatctgaccattggttaggaggagacaggatgagcactcagtgctgctggtttgtggatctgtggcacactgtggctcccaggaagggcctgggtggggatgggcatcccacttgtgaattgggcagtccacagtcccagagctaatgagcttaggttggatgaggctgggttaggcaggtaggaaccaaaaccaaatattcacatatgagtgctagttagagctgtgtttctcaaaggatgctcctccaaccactgactacagcagctgggaacttgtcagcaatgcacattctcagacgcttctgccacctctgaatcaaactctggggtggggctccaccctccttgttttaacagctctataggtggattcgctggtttgagagtcactgagatctcagagggccatgctgagcagcaggcttgcaggtcggagaactacagtttaggggagatgaggaatgtaagacagatgagggcaggcaaggacaggagcaccagcctgaggccaggctttattttagttggctccatatggtttgagagaacaggcccttcatgatgaaagttagggatgcagggacccttagttgtgagggacagcacatgtgctcccagactgccttttggtataattgtccagaccagaggctccacgtgctacacatttttttcagcccttgatagtcagaggtagacctcgaagtatccacagtgagcccagcacagcgtactggtggccagaagtgtgatcacaggtgccgaagcttggcaggtgtggaactgggtgctgcagcagtgggtgtgccacctgtgtatttgcatgcaaatgtggtacactcatttgaggtcagctcagtggaggccagctgtgctgtcctagacgtggcctatggtgccacagcctgagagattctgctgagagtgtgactgccttttatagtgctgacagaatccattgtatcgcttttaaagacctgtaatgattgtgattagccgcagagttgaaaactccctaagtgctattgcttactactgggagtcaggactaatgagtcctcctatgcatcctgtggctcggaaggctgccttgaacacatctcccctggtatgaagggcccggacccagtgtcatctccagcatttcctccccttgctctttgaccacacatcactacacattggtatgccagatctctgccagttttagaatgtatattgattgtgtcttcctctgtctttgttttaaatgaaatagatcaggcacacaaaagtgtaaagagaaaaaacaaaaaaatgtaaagagaaggaatgaacactcatatatggtgttttttgttggtttgttttgttttgtttttcaagacggagtctgactctgtcacccaggctggagtgcagtggcacaatctcagcttactgcaacctccacctcccaggttcaagcaattctgcttcagcctcccgagtagctgggactacaggcatgtgccaccatgcccggctaattttttttgtatttttagtagaaacagagtttcaccatgttggccatgctggtcttgaactcctaacttcaagtgattcacccgctttggcttctcaaagtgctgggattacaggcgtgagctaccacgcccagccagtgttcttttttctggccaacatcgcccattagacaacatacctgttctcaccaaatcctattccgcctgcagatggtcagcacagatgtgtcgtctctacctggtaaattgacagggcagtaagtttctcagggctcacattacagtaagctccacagagtcccctagacgagttcatgtagcaaaagcatctctgagggaattaaaaggtatagaaattaaagctgtttttttctttatctctcttttttttttttttttttttttttgagacagagtcttgctctgtcacccaggctggagtgcagtggtgcaatctcagcttgctgcaagctgtgcctcccgggttcacaccattctcctgcctcagcctcccaagtagctgggactacaggcgcccgccactactcccggctaatttttttgtatttttagtagagatggggtttcactgtgttagccagaatggtctcgatctcctgacctctagatccacccacctcagcctgagattacaggcgtgagctaccacgcccaaccttttttaaaaaaaaaaaaaaaaattaggtcaaagagtatttcagactcttcactctcctagtttcccttcttcccgccccaggctctggcagtgatctctggggaggaagcttgttggatagctactttccacaatgcttatgtttggaaccgtagtgaacagttatttatgttatcgaaatgatattttaaaaaaaatactccctttctgattttgccatccatagaactgaactgtgctctatactacagttcagtttggggacccctgagctcacgttctagttaggagggtgtggtggccagctaccagagtggtatctaggtggtttttctgttctgtaggttttttttttttttctctctctgtctctctctctttcattttggtggtaggtaaggaaaatcacatcactctcttctagcaaggtctatgagctattttggggacatgaaggaacgtggtagatacccctgtagagggtctacactcatttgaaggtaggattctttgttctaaatacacttggatcattgtttcaggagagaacatggagaatgggaaaataagctttttgtgctcactcattgcttctgtaaaagtattaattcttcagctaaataggaaataaaacgtttggttcttgatgaaagtattttgtacattttgcctagaacagtaactggtcacatttaatcctgtataggcttgaaactgacctcagcctcttctagactctcacagggcttctgccttcttggacagcaagccagggttactatgagtcgatgttcctttggtcccttctgtgtccttgacctgtattctgcagctggagcctcctggtagctcccagctgaagttcacctggagagttactgccatcgtgttggcctaatttgggtcaaaagtaatcaaaagaaccctggctcttgttccaagaagtgtttttgatgcagagcttcaatgcaagttttgtttttcagtatgtaaggtgtgacgaacctaccccagaaggagggagtcattccactagttggttcggggtgcgcagttgtttaattatcagtttggcaggccccagtttttcttcagttcacaaatagaattctcatttggaatatatccaatgttcatttggtttctttcagttgcagcaaatcttactatgatttgaggtttttaaatactatgtttttcaggaagtcttttcggtggcattttctgataatgccagcctgataatccaaaaaaaagtctgttaaaaagcagatttgcctgtaatcattaccttttttctgagtttgtaatcagaccttgtcttgaatctgtaaatcctgtggagtctcaggtgattttcctgactttccctgcatgcatggaggcaggtagcagatggatgggcctttatgccccgtcatgtgtgggtgccctggcagaaccctgctgctgccctccgtcttccccacagcaagcctgtggccattacaacttgtgcttctctgtgcatgtacagcacagcatctgtagcaaaaggagtctgcaagtattttggagagtaagacctgcatggcttgtttccttctgccagagaacctagaacaggcaaagacatacatgtgtttttcctttggaggcatcaagctccttcctggacattgaactttataacaatctgtgggtgaatccgccctattcctggacttgcagagagggtctccctggccaccttccacattcacgtggtccaagtggcatgagaaaggatggaagcctcctcacacctgtccccatttacctttccctatcggcaaacatcattattgtgttcttccagagacttaaataaatgtttttgaagatatgttgcctgccctttatagacacatggcagcaagttccacaactgctcaggagacccatgcacatcttagcatgcctcgggtctttccgagcaacatgggaaggtttcttttttaacccccatggtgtgcagccttgcattgcatggcagtaccctcatctgtttagctgtcctctctaggcggactttcagattgtttcccatcttttgcatgtgaaaatgcacattttccaagttctgttccttttcctgcattaaagcttcttgacctttttcctagaattttttgtttactcctgttttaagagttttaaattttatttaattgaaacatgaaataaatgtacttttctatgcctctgggctgttatttatgctgttaattcattcatgcagaggcaagggtggatgacctattttattaacctctattctaaagacttcttccaggcaagtaaagataaagagattataaaaataggtgaaaggtcaggacaggaagtgcagattggattgtgagaaaaaagaaaagcaaaatgcatttaatttcttgtgtgtgctgcataaatgctatgggataagaaaaaatatgtatgtttacacatacatgcacaagcacacacacacacacacacacaaacacacagagttcctgatacagtgggaaaggtaaaatgtacctattaaaaaaaagacatgaagccaaagcaaggtaaagataaaaccaggtggtataggtcagaggacagcaagtaagttgcagatgagagtgatgagacgtctttttggagctgaccgttccctgcttgggtgtgtctgcctgagagagcagctgaacagaggctgaaggtggggtcagaaggtgaggcgtcccagggactgagggtgtggtgtggcattggatgacggggtttggagtatgactttggggtccaggggacactgttagccttaagtgctgggatgaggagcttggatagctgtgattagattgtgggggctgtggttcctgaagaggagagcatggagcacagtgttagggactttcttgggagatatgtgtaggatagggcaaggctgtgcacagacagaaagaacaggaaagagaagggaggtcagtgcaggagaccagtgtttctaatgattctgctctaggtacgaagtgtgtttcagagtggcgaggaagggcaagttgttaagattggttgttgaattagtttctgtttgatgttaaagagaacatagagtaaatgataatccctcgaaagtggagatcttggcaggctggcgcctggtggtatagtagaaatctgagaaagggggaggatattaagtcagttttatcaggtaaagttgaatgaaataatcaagtttaagtgcgtcttgggtatttgcaaagatgtatagattaaggctaaaagggttggagaaatagatttgggagttacctatgattttttttggttattctgctctcaggattgaaaactaaagaatctcagaactgcatttctaattagtgccataaaattctttattgatgccaagtttttgttttttccttgtaaattgtggtaggtagaattctaaatgacctccagtagacccactaccagtatatattgcataatccatgggactgtgtgactagggtggcttatactcctgtgattatgtttaatatatggcacagttgacttcgagaagggaatttattgtcagtgggcttgacccatttgccagagccctttaaacctgtatttagaggtcagaagctgaggaggtaagagattcgaagcaggagaggggtttatgtgctgttgctggcttggagatggagaggactacctggcaaggaatgcagcagtatccaggagcccagagcaaaccccagttgatagccaacaaggaaacagggacctcagtcctatcactgcaggagctgaattctgctagtacaaagaatgagcttggaattggatttttctccagagctcccagaggagaactaagctccaccaccaccttgatttcatctttgtgacactctgagcaggggacccagttaaaacatggccagacttctgacttctggagctgggagctaataaatgagtgttgctttaagccactaagtttgcggtaatttgttacacagcaataggaaactaacaaagtttttgaacaacagttgaaagttacaggtagtatagaccattatataaactcacaaatttaagacagtgggaatatgggactagaaagaagttaaatggttggtaagaaattctaccacttagcccacattgccacccttcccatggccagcccactccactcctttcatagcacttagtggagtgtgtccataacccgcccaagtcttgctcagtgttgtagcagcagcattgtagcagatacttggttttcagcctgaatgtattcagtgaacgaacgtaggaaggaattgtgaaatgctagttggagaaaataagcagctggaggaaagaaggcaagctggagattataggaacagtgattcaaagccaaattagaaattgtaggacgatgcttgttatcctagtccactggggctgctgtaccaaagtaccacagatcgagtggcgtataaacaatggaaatgcatttctcacagttctggaggctgggaagtccaaggtcagggtgtcagcagatttggtgtctggtgagggcagcttcctggttcataggtagccatctttttggtgtaacctcacatggtggaagggacaaggcagctctctgggacctttttaataagggcactaatcccattcctgagagttccacccccttaacctgattacctcccaaaagtcccaccttctcataccaccacattggtgattagtttcaatgtacaagttttggggaggacacaacattcagtccatagcatatgtcagtggttgttaacagagtcagaaggagttgagaagtcaaaaaaaaaaaaaaaaaaaaaaaaaaaaaaaaaaaaaaaagggattttgctagggagatcccactgctgagtgcagatggctttctgtgaaatactgaaaactaagataagatttcagtaattagaattaaaaagcagatccttggatcctggtgtcatcttgccagccatcttggtaaacatgctgtggtcttgatgagacaagaaaattgccatgtatgggcatgtttttcatgcttgccttcaatgcgcatgtcttttctgcgcagaagtggttaacatatgactaacctatggaaaagaagatcatgtgtgatcttttatgaaaaatgatcaatagtctccttgttaatatcactaataactttatacagcctattgagtgtaaaacatacatgcaatattcagtttcctgtttagtgatggaaaaggtctgttctgtgaatgtttattagcatcaaagaattctgggcacgatttttaaaaactgaaaagggaaataaataggtgagatacgaagtccccatatggttgaaatgtctagagatgaaagggctggaaacagcttctatcagaggtttgttagaacttatgaaagttgtagtaaactgctgtgatgccagataaatgactggtaatgtgtctctgtgtccagtatgtgtttcataggcacgtgagaacgaacaaactttagaaggtagccatttattacatagaaactagaagcttattggggagtgggtttgtatatgaagaggacattgcaggatatcataaaatgaagagaaatgtgactaagattctcacattgtgcaggaacaggtgagtgagagtgttcttcccctctgtccctttcagttggtatcattatcaggtattttttcagaaaaggtttctgcaaggagtaagagaggcagcttctaacaacaaaggttacacagacatgatttaccttttgtggactagctttaccccaaattgcattgttaaagttttgaatttataattaatgacagcgtggactacttagtattttaactgtatttgagaccacaagtagtttcttcaatattttctcaagcccttgagacacttaattctccctcttgacttcctcttcatcttagaaactgcaatttcctttgtaggaacaacttcctgctgggtactgccctctttggccacttctgtcttgggtgcctatgtttttatctaaagccataagtgcattgcaacactagccatttcatcatcatgtgaattgagaaagtctagcaggaagtcacaagttgattgtccccaatacaagcccaaatgtttcttggttgctgtgtcataataggcagttggtgttctgaatggcagttatgaagaggatactttgtagaaaggacttcttttctagagatatatttaagagcctgatcattggagaacaaaatgcatgcggaaaggaaatattttaaccacagtctaaaaaagatcttatggtccagtgctgttttcccttatagtcctattaaattcattaatttccaatggtgactttcttggtttgtctggatttttttttgttttttaagggttccctaccccccattttaagggagagtcttttcctttaacacaatgtaaagaaatctcttttttttttttcatcttccattttctttattttctgcactgtaagtctcttctgttagtttcatctttcttttcaggacctggcttcatgattgtctccgaaaaagatggtcttgtaggcacaacgataggtcagcagtaattaacctatgaagtgagtggtgattacaaatgtggtcgtggactctggagtgtcttttcctgtgtgtaacatcttatggagaaagaaatctgtctccttagaaggcagaagggacctctttagttgccttctgtatcaactgcataggaggcgcaatgttgattttctctgtgttgctattcatatagagcagttgtctctagggctcccaacacataagaaacagtatatcacacacaaaaatatttttctgctgttgttatttagagatcagataagcagaagctttcagtaagtgaagaggtcaagattttttttttttttttttttttttttgagacggagttttgcgctgtcgcccaggctggaatgcaatggtgcgatctgggctcactgcaacctctgcctcctgggttcaagcgattctcctgcctcagcctcccgagcatcagggattacaggtgcgcgccatcatgtctggctaattttttttttatctttaatagagacagggtttcaccatgttggtgaaaggctggtctcaaactcctgaccttgggatccacccacctcagcctcccaaagtgctgtgattacaggcatgagccaccgtgcctggccaacatttatttattttatattctctcgcatagtagatttttaaaaatctagtaactggccactgaatatgaaaaaaaaattttaagttaaaaaaataacctcacctttttcaaccacagttccctgtagcccctgccacatttcctgctcctgcttaacaaaccctgttgagatagttgtctaggtttgctgtctctagtgtctcctctcccatccccccatgctaactgcagtccagcttctgcctctgacctccactgtgctggtcaccaaggacctacacaaggtagaatccaaaggcagactgtctagcctacatggcttacaagcagcagtgggactgttgatcacttgtgcctccttggataacacaagcaggtttttttttttttttttaaggaaaaaaaaaagaaaaccattaaagtatagatgccactacatgaaactgttgtttcaattactgacacttctgtctttccaggtgaaatgtgtgttgtggtccaaagaagtttgaaaaaaaattgaaaacccttatgtagatcacagggattaagagcatggacaacctgggctcagacagccaggttggagcccactggtcactaactgtgcctggagcaacttacttaacctttttgagtctcagcttcttaggtggcttataaacaacagaaatttctcagttttaggggctggaagtcagagctcagggtgccagcatggtctggttctggtgagggcccttttccaggttgcagtctgccaacttctcatatgctcacatggcagaaagaacaagctagctctttgaactctgcttataaagctccactctcatgacctactcacctcccaaaggcctcacctccacgttttggattagatttcaacataggaatcttggggggagacacattcagtgtaatggtttacttctctgtaaaatgggtataataatttctatctcatagggctgtagtaagaatcaaaagaggtcatgaaataaagcctctgtcacatagtgcattgcttcaaaaaattaataggaagtaactggctagattccaccaggtaagacagaaatcttctgcttggagctttctgtgatgtgttaatctcctttcagcctaaccgctcatattatttgtcccctggttctgccgtattgactacatggtgactctccaaacatggtggactattcaagtgttcattcctccatctctgttctcctgctattgctttgcaggagcacccttctcttcccagtcttggccccagcctatgaaacatttactcattttcaagtcacctcttctgggaagacttccccatcaacttccatgcctagaaactcaagtccacccatgtccctgatctattacagcacctgtgactctgatgtttttgatgtatttgcctttctgatccttcttctgtactttgagtttctgaggtcaagaaaaatgttttatttatcgtttgtccccagcctaggacattgtcaggctcatagtaaacatgtaattagtgtttgatgggtgagtaacgataggaaggcttatctttgcatagccggtgctaggcattagggagacaagctactatccctgtccttaagaattttaactttgggagtctgaggtgggcggatcacctgaggtgaggagttcgagaccagcctgaccaacatggtgaaaccccatctctactaaaaatacaaaaaattagccaggtgtggtggtgcatgcctgtaatcccagctacttgggaagctgaggcaggagaatcgcttgaacctgggagggggaagttgcaatgagcctagattgtgccactgcactccagcctgggtgacagagcgagactccgtctcaaaaataatgataataataataataatataataattttataatgtctttcatttaatcctcatgatgattttgtggaataggtattattcttttacaactttttaaatttttagattcatagggtacatgtgcatgtttgttacatgggtatattgcatactaatggtgattgggcttctagtgtacccattacccaaataatgaacattgtacctgataggtatttattattctttctctgaagttggagacagtaaggctcagagactttgcaaaaccaggttacacccctaacagaacactatgcctgaaattcttagcaggggttaggtactgtgctagtcgtgagggcaatgaaaaggaagagatgataaggctaggattaggatctccaagaatgtatttcttaattatgaaccttgtgatctaactggaaattggagatacacctgaaaatattcagtacactactgtggaatgtattcctggaatgatagtataaaattattaaaaatcttcagttcaccagagaagtagtatttcagataggagtctcctatttcctaattgaaaagcataaatttaaaaaaatcacatttgttaaaaattccatagactaatttcctaacttgccaatttttatttcaaaagaattagagactatcattgtgtcactcttatttagggtatattaaacatttctgatccaagcaaagttttacttatagtgtggagaaaattgggcatatggttggtacacattagtactttgtgtggtgtttggcaatttgagggagatgtgcattcaaagtacttgaaatttcaaggtttaaaatgtggcagtagtttaggtgggattttttttcttttttttttaatttttatttttgttattatactttaagttctggggtacatgtgcagaacatgcagttttgttacgtaggtataaaagtcagtgcttttcattatgtgggtgtgaagtatatgctctagccatattgcttcggtgattttcagtagattaagtcatccatcgtctttgcaaatcaaggagggtgttagtggtaggcccaaactgctattatttaaaacttctgtagaactcacattaatatttgattgtgttgaaatgcagttttctggcttaaaatcaattttttaaaattccaaattaaaaagataaatcaaatgtgaatggtaatgattttcagttattaataaatatacaagggcacaggcctaggagaaataagttgtggtaagtacttacccctgaggtttactttttaaagtgctacatacagtcagccctggtaggcatgtgtttctgttttatttgttcttgtaaagaaagttgagctgtttttgacctgttggtgtgtgctgttttaggttcgtttgttttattcattctaggtgtggtgatggtttctactgagacgtctttttttctcttattcatctggaaaatttaaaagctaggattagggacagatttggagaaagtctatcaaaagggattttagaagaaaataaatagataaacctgacatttctctagaagttaaaacaggataatagtaagcagttccattaaaactttttttgctggccaggcatggtggctcatgcctgtaatcctaacactttgggaggctgagatagaaggatcacttgagccgaggagttcgagaccagcctgggcaacatagtgagaccctgtctcttagggaaaaagaaattatttgctttatatcctgagttactcatttaaacttgtaaaataaagactgtatctattcaaaagtaattaaactttattgcctagaaatataaattgtcccattttggttatattttcaaattatttaggctaaattattttgtcttgcatatgtagttttaagtctaaatatccagtcaggtggacttttggtttacttcatgtctgtcagaagagaatatcttcctgtttgtctccatcccagggctcttcatgaatttagttttagatgttttcttcatttttagctaagttttaatcttctaatttgttatggacagcttggctttcagttatacctaatttaatcaaggagacaaagccttctgtttcaagaatgtgattttaaaacacacgtttaggtggggcattgtgtctcatgcctgtaatcccagcactttgagaggccaagatgggcagatcacttgaagttaggaagtttgagaccagcctggccaacatggtgaaaccctgtttctactaaaaataaaaaattagccaagtgtggtggcggagacctgtagtcccagctactcaggaggctgaggcaggagatcacttgaacccgggcagtggaggttgcagtgagccgagatcgcaccactgcactccagcctgggcaacagagcaagacttggtccacctcttcccccaaaaaaccccagacatttaattataacagacaaggccagagagatgtgtagccaaggttgatggacagttttcaagggataagattttcttactttgctttgtctagtttaaaagttttattcttttgaggggcagtggggaatagattgagttaagagttaataggcttttttttttttttttttttttttttgagccagagtcgcactctgttgcccaggctggagtgcagtggttcaatcgtggctcaccacaacctccacctcccagcttcaagcagttctcctgcttcaaccttccaagtagctggaattacaggcgcacaccaccgtgcccagctaatttttgtatttttagtagagacggggtttcactatgttggccaagctggtctcgaactcctgacctcatgatctgcccgcctcggcctcccaaagtgctggcattacaggcatgagccactgcgccggctgttaatagctattaagaaaacaaaaataacaattgttttctaaagcacggccttcaaagaaataggtttaattgttccatgttctcaagctactagaaaaatttttttaaagaggcagtgtctggctgtgttgcataggctggcctcgaattcctgggctcaggggatctccctgagtagctgagactacaggtgcgcaccactgtgcccagaaatgtcttgttttgttcagtttcttttaatacagttgtcattaaatcagtaagttgtagatgttgaagaaaggaatttgaatacatttggggctcttagaagcattattaagaatctagcacaatagaaaagctttttaagtttgacttaattcaaagttctacattacctgaatgcttaagattatgttaatgctgagacagtgttcccaggaagtttgttattaatcccaggaaatccatcattttacatgaccttaggatagaattatttctaagaaaaaaatcatttcaaaatcatctctcactgtgcctttttagggactttgattgtgttagacacactttgaggtctctgagcaacactgaatctaggtaaattaaacctttttgttgtaagagccagttacaggaactgagcaggaattgaagagcaaaaagattatttatttctggctagctttaaacatggatgagatcacgtgccaagtaatgtgagcagccttttgaagttgagagcagcctcaattgcttgcaaggaaacagggaccccagtgtggaaggaactgaatcacaccccaagcaggtgtgattggaagaggatcctgagctccagatgacaagggaccccagccaggaccttgcttttggccttgggaagccctgtatatagaacccggtcatgtcatgcccagccttctgtttacccagataaagtttgaacagagctgtgagctgataaatgggtcgtgttttaagttgctaagtttgtggtgatttgttgtgaagcattagaaaacccatacagggcaacattaaccagtctggaatatcccagtgccagtggcaggatcccatacatcaatgtctcttcagaacatttgatgttgtactaaggtcatagtaggttccaataaatagtaagttgaattttcaaaatcactatacttgtagtgtaggtcatctgaattttagagttttgtagcatatcaaggtacattgagtgatgaggaaaaacatcttgagattttccttaaaaaaaaaaattttttttaacctagtaaagaaattgagaaacatcatttttattgaagtgcatttgttctggattggggttggcaaactatagcttacaggccaaatctggcctatcacctgtctccataaataaagttttattggagtacaaccacactcactagttcatgtgttatctctggctgccgtcgcattacagtggcaaggttgggtatttgtgacagacactgcatggcccacaaaacctaaaatatttaccatatagtcctttatagaaaagcttgctgacccctgttctggatggtgatttgctttctagccacagccacattcatttaaccctaaatggcttccatctctggggactggtatttcttttaagtcctttaagttactatttttaatgtatttagctatacctgattaccaccagggttgtatagactggtttttacatctcactgtactgaaatgataggaaatgtgataaaattaatacaatccgataaactttgtgtgtttggggtccctaagattatctccaagttcagtgctttgctagaaggagtcctaggacttagaagtaggtatactcatgactgcagtttattacagcaaaggaagcaagtgggaaagatgtgttgggagcagtctagaggagaccaggcacaagcctccaagtgtccagttccatgggagttgcacaggacacacttagttcctctagcaatgaattatggcagttcattatgtgcaaatattgtcacttggtcctaacagttgaggatttttattctgattcagttttgtagattcacagggcctgtgtgactgaccacagctactgaaactgcagtccctcaggaggaaacagcaggtttcaccataaagtatgttgtttgcacagactgtgtagacagagtggtcaaggtttcaagcatgcaaacatttctatcagaatattccaagaactcagttcccaagtggccgcgtcaagggccagtcacctgaacaggttggagcaactcagcctgctaattcattcccaagctctccataataagaatctctagtagcatatatttcagaaacacaacatgttctgctagttgtacttatattacaaaatgtccttttagtgccttgattatttttattcagcagtatcttatcttcatttaagaaacacttatatgattctataaatcaagcccaggataactttatagtacttaaagttatgggtaaagttacaccaagataaacattgttttgtttgaattcataacttaaaccaagtgtcttcccaagagtggggtttccagcactacctttgacatttctagtttttcttagggactgagagtacctggcactttttcccatagttcatgttcttgcatgaatatcaaagagtaattattttcagagatgacttatgtctataatattgttttagctcattgtggccaataaaattcccaacagtatattaaagactatcttttcactattgaaataatgatgaaacaagcattatgaaacatgacacctttcaaattccttaatactaaagtccttgggaaatcacacttgttgaatgtcatggttatggaaaaatacataggacaaatttgttctttaaagagaattcattttgcctttctttgtaattgcagctatcaaagttaaatgttatctacatacatatagattttactctcttattcttctggcttccattattttctagacagagcctggtacattgtgtataagatactgtgtggatagtggtggttcctgagatttttctgttaacttgtgtgactgtgaacaactgcatataattcatttaatcttgtgtcagtttacctcatttgtcttctttcaccccaaagtaatctcatgaggattattttgctcaagtttgattatttcaaagaaggatcattatgtacacctaagatggcaagatggcaaggtggcacttgccaaaagtccagccggtgcctttggagctaaccttggatcttgaagggggccctgggactctgaaataattgctagtagatttgctttacagttgagtgttttgagctctcagtggctcagcttaattgtgaaaaagtagccagatgtaaatctctaaagagcagaacctatattttattcatctttatagtcctcctagtgtccacattgagtcttgctgttatctggcccctaaacccaaggcaaactggaaggggctggtggctttggcatcagccagaaaaggctgttagggcagtatccggcaccctaggagtggggccagcgagcagagcagcctacatgtagccagagggaaggaagcccagccgggaagcagaactgcactacctcagagtccaaaataatggctttccacaggaatgcctgtgggctgtcatgagattattcgcctatattcaacatataataagaagttagaagaggctgggcttggtggctcacgcctgtaatcctagcactttaggagtgggcggatggcttgagtccaggagtttgggaccagcctgggcagcatgatgaaaccccatctccacaaaaaatacaaaaattagccaggtgtggtggtgcacacctgcagttccagctactcgggaggctgtggtacacctgggaggcggaggttgtagtgagccaagatagcatcactgccctccagcctgggtgaattgggtgaaagaagaaatcatggaaaacttcacttgcaagagcttttcattaaaatgattaaaatataagattttagagaattcagctccatgaggtacagtgaaacactggttaaattgtggctaaaggagtttaggaaagactacttactgcagactcctcgtagagggcacagtgcacacaagcatattcaaggtttctggggcctatgacaaggcctgtttaactttattcacctgagtgtattcaagcccatgtgcctgcggagctctgtgtccccttgatccctgttgcctttgctccttgtggagcttctgggtgaggagcaccccctgggcccacagctcagggctgtccactcactggttactgcttttgcttttctttattgcttttgttatcctagaacactcacctggcttgattcctctgaaatttgctaccttctcaggacttctctctcaatttcttccattttccccacccattgtgtagcattttaattctttgccttgaataaaaataaagcttggctcataaccagaagcaacctgtcttgccttgggtccaggggcataagtgaacagatttatttttaaaacatgccatcgtgtttgtttctactaattttgaggcccaggttttgagtgtaggtctgagtcgatgacctctcagcctgcaccacagcaacgcgtgctgcccctgcctgggcctggcagaaggctcccttgcagcagctcaggactcacactcactgagcaggttttaaaacacacagaatggccagacaggtcgtatcacagtttgtgtcagaattccacaggtgtacactatttttttttggagaagggggtacttttcatctgtgatcactgcagacaaggtgcgtcaggacctcggaggaccgtgttgctgggcggggcctgctgtttgctgtggagccccctggccctggtcactgccgccttctccaccctccactcctgcttggtgaactttgacccggcaggtgcctttcttgagcctcgtgattcccctcccctcttgccccgctgtctgtcatttctccttgggctcctcagagcaggtgccaggctgacgataggtggagggggcttctgtaagccagtccataggtttgagttaagttctctccttctcactgagctgcagctgaggttggaaacatgtatctagtttaaggaaggcaagccaggtggttttcagaggtgtaactatgggtgtagcttgttaaacctgtttacctcagaaaatatttttttccttgaatgtatgagaaaacctgtagcttttgttttgcctctcactagctggctgattttcacggataaagtttcagtcacaaaaagcacaccatgtaaacagtgaaaggagatctcttattggtggcttaagcctttctattgtctggaattggtgttgctttattggttttaattcaatagaaaataaaattttgttagcaactgggagtccaatatactctttattttgtgttgttttgctgttcttttccacacaaccagtgaagttcttaacgcgtaaacagagagcattctacatgaattaatgtgtgtatgtgtgccatggctgcactggggtaatagacctgtggataaagactttgggtccctccctccttccctccctctgtacccattgtacccagaatgattcctgatacacaggcactcagttaatgtgttacatgaataaatttcattttagaagtgagagtggaaacgcaggcatatgataaccaaatctattgacctgtcagccaccagtactctttcattcccctcagtgtgaagagcagtcttggttttgattattttacttgccatggtgtatcttctgtagcatttttgttgttgctcttaccatccaacctccttaaaacagtggtttgtatgggatttaaaagcttctaggcagccagggccttctgactctttgttctttccttatggtgctactgactgtgctcgtttgtagtgtgactttaagaaagggaggctgaactcaggataggcagggtgaacttggcataacactgctctgggtgttctcagaagatcctattcgggcaggtctgggcctggtcagtaattgggtgggaggcctcagagagcagaaaccagcgattggcaggaagtggcatgggcagctcacctggcctgcgagtctgggctcagctggacctgccccacgtggcaccaggcgcacaaggtgtcctcacagagccgccccgtggcacgcctttgcatgttggccaagaccaaagacttgagacttttgtttttgcatgaaatatgagtcaagtgaagttttatttcttatgattggttatctcaaataatgatattagtttagttaccatcctccctttgttctaccagctgggtagcatttagctacaaaggtgtaattttaaaataaggatgtgataatttattagtgatattccattattgctcttggtgtgacctttctataaattttagaatcaagagctttaatttctgaacattaaagaatggtgtttcatctggctaatttgtttcataccaaagaggcactgcttcatcttgaaattagacttcaatgtcttcctgacttgatagcagacacaggttttcatctaggaggaccctacacgtgtagactgtcatacatggacttagattaagatttgattgataggaactgggacactgcagttcaagggtagcacttcaggtattcagggcaatcacaagaagtttttctgaacatttcataaagaaatgtgtaggtaagattacaggaagtaacattagcttaaagagtagcaattgaattatataaagcattgtgctaattaatttttaaatttaaagttttttctctttttttgagatggaatctcgctctgttgccaggctggagtacagtgatgcaatcttaactcactgcaacctctgcctcctgggttcaaacgattctcctgcctcagcctctggagtagctgggactacaggagtgcaccaccacacccagccaatttttgtatttttagtagagacgtggtttcaccatgtcggctaggatggtctcgatctcttgacttcgtgatccacccacctcggcctcccaaagtgctgggattaacaggcatgagccaccaggcccagcctgaagtttgttattttttttaaagaaaaagtgatactgttgaatatccacctctttagagaattgtagcattttaaaattgttttttctggtcagctcctataagtatatgcccgcatttctccttttatgcaccacttccccccattgcatacattaccaaaaaactggaagatttcaagttagagaagcaataggtctttttcttatcgttttgactgcccagtattacagattgtcaaaataaagaatccccaaaagaaacggaattgtggagtcattttaactcctagtatacagcctgtgggaggctgtctgtggtgaggcaaagctgtagaaatgcccccgaactgttggaagcccaggagttagggcactgctgcatcctcaccctacccaccacaggggcatctcactgggatcttttcttctccatggtctctttgccaaacagctgcttttccagcctcctgccaggtgctctgtgtctttgtgctggtcctcttgagcatttaaaactccaaatagtattttatttcttctttctttgctccctaatattttatctgtttcaattaataccattatcctggctggcatgaactttggcctcttctagtatatcacttgaaccaactgactctttctctgaagtgttttcattggtactatttggttactgaactgttttagaataatagttattaaagtaatgggccggaaatgaatcagcacttgccagtgtgctgaattactacattaaaatgctgtattaacttaatttgccagagcatttcatcagtggagttggaggtggagacaagtcagaatgcacagactttaccactgacccccagactccagtgtctcaaagccctatttaatgagtgtgggtgaatttgcccaagttcatcatcattctaagaaaatagatttagagcgttgtcgccactgctgatggttctgttgatttatttgcctttgtgcaagaggacctgtgtgctctctttctatacatccacctgcaggcacacacttgtatttaatttatgctttagaaaattatttttataagtaaaactatatatttgtgttttttaactataatctttataattagtagaaaggaggcttgggcttgccattttgattatttgcttttatctttttgactcaaggacagaaattccaggtagtctgttcaccttttgcagtgcagggtttcagtgaacttgttaggcctgaataccaccaggtattattagtataaaatgttcatgttttgatatatggtatttaattctcgcaacttactgttttggtaatgcattcacaaaactctaaaactggaaagagaattcacctgaacaaaaatgacaacagtttatgaaggattccatttttccctactgaattcttagggctacattagcatgtattggtttgttgaattaattagtgaatgagagtttaccactcatttttaagcccacccagccccctcagtaaagcaaaacatcaatgtttctggtgaaactactctcaaatctttgttcttgtgtagttgtatatgtacgtttttgttagcctttgaaaaagtatagctttactgatacttctggttttctatttactttgaaactactaaaataaagcttttgtgttacgtaagactgatgaaacctagcattgaagaaaagttggaaatattattagaaattactttttcttttttttagtacttcagcgtaatttgtatagaaactggtatccgcaggctgtagtgcccttataccatgtttaaaaacattttgttttttcagttagtggcaaacattttacaattaggaaaattcacttaggtttcagatttctttatcttcccttgaagaaactctgctagttattgggcagattgcctgtattgcgggaggcggttcgctctgagcagcagctgccagtttagacagatgcggggcttccctcacacccctgccgtcctctcctcctcctccctctcaccctctgggctggaggccatgaactcagatcctctgctaaaaaattccattgccgactcaagtcagtggccactgatatatttttgtttatctagatggcctaagaaatatttatttatttcttgttctgctcattttgaagggagaacaaacatccctagttacttaacagattgaaataatgtgtcctctcctacccatgagatcacttcttgccagtctctctcttttgttccttctccctccattttgttttgttttgtttcctcttttgtcacctgagtgtctggatcctctaggtccttttatactctctacttttaatttactaaattttaaatatttttaaataaaaaatacatacttatggaaaaaatttcaattagaacagtagttaaagcaaagaataataacctcagctcccagaattaatcattgttgtttcttgtgtagtcttcaagaactgttctgtgtatataagaatatctgtatgtgttcttctgtatttttttgtttttctcacccgtaaggtcttcctatatatacattagttttgtaattttctgtattcttatcaagacttatggatctgtcacattgtttctaatggctgcatgatattttcttgtataaataccataaccagcacttgattaatggatgattccagttttttggttttgggtgttctttacatataaagtatgctacgctatgccttcatgtacatatgagtctggacagttgaatgaatagaccctgtaagagaattgataggttaaaagtatttacattttaagttttaacataccttgcttttagtctcccagcacagtcacaggaattcactctttctgtcagtggccaagtgcttctgccggcctgtggttcccagggagactgatcatcttgtattggtagtttgtatcacgtttccttggaatgcctttttgcatattttgctcattttttccattgggttggcttcccatttcttattgattcatgggagttttttgtacatcaaagaaaacaaactgcttgttaattgtggcagattttttcttttttgtcctcttttgttgttgttgttttaccagtttgctctcttttaaatgtttctacttggggaaatttttggacacagttaaatttttatgtggtctgtcatttcttctatggactttgtgtcatactagaaaaacctttctccagtttacaattatttttaaaatgtatccatattttgttttagttctttataaaaatattttgattttttgatcctttggaaattgattttggtgtaaatagagagggatccagctttttttttctctctggataggtagttattcccaagtaagtttcttttgcactcttatttttattatttttatatgcaatcttatttctatgtaggtatacttaaggaatatcaatttgggtatacttcaggaatatcaatcattggatagtctattcctgtgttggtaccaagcttttaataactatagttctacagtatgatttattatttggtaagtgtagttgcccttcatttattttcttttttagaattttccttgcttgaatgaaaaaagcttgagggaaattctttaaatttaatggggtaattctacttgacgtaagtattcatatactttatatatgtatattttaaaattttttggttacactgaggctcctagttattaactgttgctttgagattcactgaggaaatcaggtgtgtatgcctggagaggtggaacagcattttggaagagtggagtcaggagtggtaggaagtgggctgcttcctacctctgttactggattgctgtgggggctcgagcaagccactgaagtgtcatccctcatgtgttcccatgtataggacagcctctcccagtacagttactgatatttagatataatgagtagttttccatcactgtttttcattcagttgtgagaaataaatgagttaatacatttataaatatttcaaaactggtggagcctagtataagaacttgatgatgatgatattgttgtggttattttttctgttttactatagttgaagggagcctaattttctcatgttccagaaaataaggaggaagtggggggacgaggggagagagagagagaaagagagagagagatatagatatagatatagatatagatatagatatagatatagatatagatatagatacagatatagattgaacttactgctgttgccccagccccagcactcaccaatttctgctagggtgctgaaggcagacctgtgtgatgaggggatatttaagctgaaaccttgaaacatgagaaagacttagggaaagatttggggtgggaatgaggaagcatattctagggcagaaagggctatggcatccacaggcagggaagaatatagtgtagaaacctgaaagcacgtcagaagcgctggggagcagcgaggaggcagacagctatgaatggaggcctggtgggagcaggggccacctgagggcttagagaccacagggcaggtggggggcattgaatggcatcctaggtgtactgggaagttgtttataggatcttaagagcatggaatgctctgacttaggttgttctgattgtggtgtgtagggcagaccctggcaggagggcaggagtggagcaagagaccagctatgagtcacagccattgtggtgccaggtgggaatgggtggagagaagggggcacatccttgttagttttagaggtaaaacttagtcatgaattgaatatcaagggacttctgacttgcacataggtggcatgtggtattattgatccaggtgatactgaggcaaacaactggttttgaggaacatatcaggagtttgattttgaacttgttgtattgagatatttgtgaatatgtgaattgaaccctttaagggaagatgggcagctctgaaatggagagaagttggccgggatatttacagtaactcactgcatgagcatttcccttcttcaaatacatcccatttgcagtctccacaacagtcttctcaacgtgtcttccaagttcatgctccttgcctacttggaaatcttcaaaagctttctgctttcttcagtgatatctaaactgttaaacctgacattcaagatcctccacagcttgctcctcacccaatccataggattatgtttttcacatcactgtctcttgcctcccagtatgaactctaaactctcagttgtctagactcgtctgtaggtcatgaaggtcattgtactttcctgccttaggtgctttcttctctctttctgtatctttatcggttgagaattttctaatcctctgagacccagtataggttttacctcttccactatgtctgctggttttagatcaaccagaaataagggctccattttttgtccatttggagcactagtgtgagccatacttatatctgctttattttatttcaagctctttatggaagtgtgtctcatcatattttctctattccataataccttgtacatggtgtgtactgaataaatatttatttaatattttctctatttggagatatttttcaggtaaatatccttttggttgcaaataacaggaaccaaatgtagctggttttaaaagaagagaaaattcactagaacagtactgcaaatcttgagtaacttaagatgaagttgaaggatgaactgaaccttggggcagccctgggaacctcaccagcatgagctcatggacttttcgtctagaggtttgtcattagtgtagcttaacttccacttcccagactctacgtcagttcaaaatctggaggaaaaaaatctgattggcttagcattggtcagttgtctacctgaggccaatcagctctgacccctgacagaagtcttatcctagacacatggccactgagatgtgagatgtccataaccccatggctgccagaggttgaagggtttccttctgtggacagagacatatttgttctctgaaaagaggagtcagaaataaattgcaacagatgtgtactacagcagtattgctaactttggaaacggagccagtattgaatactttatggttttgagaaattgtagatggcttcaaccaaggtcatgttagtatattgcaatggaaataggaccagactgttgtctttgttgactggcttcataaaaactactccttgcctcatgccagtgttgttgtttgtgatatttactcactaaatcagaagactcctcctcccaaacttgcttacatcaaggaggaaaaaaagtcctgatgataataactttattgtatttaaacattagcagattatgataatagctacatagtcattctttgctctgtgcatttgaccattgcagatgttttaatgctataaaagatcctgacttactcatctgtattatttctgtaactgggctatatatctgaaggaagtaatctgtgaaagtttcaagagggcatcagttggttacctttgcaaaaataggaaaaatatggaaaatgtaagtgttttaaaagaaaaacaaatttaaatctttgttcttgaaattcatcatttgcgcaaagtaattttttttgtaaggatgatttggtaaaggataaaagtttccggccgggcacggtggctcacacctgtaatcccagcactttgggaggccgaggcgggcagatcacgaggtcaggagatcaagaccatcctggctaacacggtgaaaccccgtctgtactaaaaatacaaaaaattagctgggcgtggtggtgggcacctgtagtcccagctattcaggaggctgaggcaggagaatggcgtgaacccggaaggcagagcttgcagtgagctgagatggtgccactgcattccagcctgggcgacagagcaagactccatctcaaaaaaaaaaaaaaaaaaaaaaagtttccatggaacaaaaatttcgcccaagtacattgggtcaccatgtggcagcagtaggcaacctatcaggaataactgtggttaagaaatgtggttgatgtttttaaggtactgggaaagatgtcagtggtgtataccgggtctttcttctgtcactttaaaattttaataacaattttctgaccaccttctctctatggaacacatagatccagatgattgaaaaattcattttctctcctactggagaaatggttaaaggatatgaacacacaggaagaaatgtgaagagccaattaacaagtgcaaagaggctcaaccctgtgaatgatctgggatgtgcacacttaagtaggagagataaaacatttcacacccatcagatatgtatacatttaaaagtttaaaattactcagtgatgctgataatgtgccacagctttcaaacactgctgatgggcatttctgtcagcacagggtctctacagagccatctcccagttgccagtgtagttgagaatggactgtccaagaatccactgggctagtgtataccactgagaagctagcatgtatgtgcccagtgaaacaagtatagtacacacatgttacagttttgttttaatgtgaaaatttacaaaactcttaagtgtctaccaacagtgaaatagataagtaaaaagtggtatagtcagaatactttatagcaatgaaaattaatgatctacagctgctgtgtccttgcaaaatagttcatttgtatgtgtgctattaaaaaaaaaaagcagataataatgaaatgccaaattcaggagagagttgcctctaaggagaacaggcatagaaagagaaatataggacatatcaaccataccattaaaaaaaaaaaaaactaaagaaaaacttgcatcgtgttaaaatttgacagaaggtgatgggtacatctacttgttatttttttttcctacctttctgtgccgttaaatatttcataataaatagtcattatctgtatcttaaaatatttctcaaagaatttttccatttttggatgattaagctgggaatgggggagtcaacttgttcaaagtaacaaagtaattaaacagttgagctgtgatcaaaaacaaatctgtcttgttccaaaacttatggccctcctttctcgttagtctgattctacaatgtagaaaggaaatataagcttgaacctatgaacctgcagttgcctttgacctatttctgactattccctctctcttccaccctctctggcacacacttgtctgtgcacacatgcacacctgtacatatcctttctgaaagatcgtgtgtttctcacagtcgggcttaggccaagacagctggtgtccggtgagccagtaggtcctctctgtccgtggtatgagagttcctccgtgttcatctggggttatggacgtgggggatattctaaaataccatatgctaaaatgatggcttctagttatcctttcctaaaggtgttccttctgccttggttcctgttagaaatgactacatgggccgggtgcagcagctcacacctgtaatcccagcactttgggaggctgaggtgggaggatggcttgagctcaggaatttgagaccatcctgggcaacaaagtgagaccttgtctctacaaaaaaaaatttaaaaatagccaggtatggtggcacacatctgtagcttcagctacttgagaggctgaggtgggaggatcactcaatcccaggagagtcaaggctgcagtgagctgtgttcacgccaccacacttcagcctgggcaacggagtgagatcctgtcttaaaaaaacaaaaaacaaacaaagtaaataattaattaaaaaatgactacacgaagaatccaggatttgctctgtgggttaagacagtatttgtctttttggttgtctacagaagacattcttggtgttcctcattgtcttttgtatagaaatcttcttagaaaccaagaaaaaaggccgggcgtggtggctcacgcctgtaatcccagcactttgggaggccaaggcgggcggatcacgaggtcaggagatcgagaccatcctggctaacatggtgaaaccccgtctctactaaaaatacaaaaaattagctgggcgtagtggcgggcgcctgtagtcccagctactcgggaggctgaggcaggagaacggcgtgaacctgggaggcggagcttgcagtgagccgagattgcgccactgcactccagcctcggcgacagagccagactccgtctcaaaaaaaaaaaaaaaaaagaaagaaaagaaaagaaaccaagaaaaaagttttaacagaaaaataagtacaaattttaaaatattaaatttaaaaccaaacgacatgtaaactatatgggctaaaaagcatagctaacatttgctaaatgcttatatgttagcatttattactgcatctccaatttgaagatggggaaacaacctcatcaaagaaactaccttagggaagttaaataaattccctaaggtagcccactagtagggagtagggctgagaccacaacagtgttcgagtcagacaccacctttatggggaaggaccttctaggctactaccactccaagtggtcttctccatttctacatctgctgtatgcagggtatgtttgctttgtatttttagtttagtttttccttcagtttttaaattgggtataaggatgcaagagcaaggatggacttgaaaatttctttatactgctgtagcagctaacatagcatgtgggtagttggcattcagtatattcttagatattagctaattctcactgaggaagcaatagcttaagccaaaggtacctaaaatttgttatgggttgatgctgagaattttgaagtactacctgagctgctaagtcttaccagtcttactgatgttaaattcttcactgaggaaattcatttggacttcatggttttcatgattttaacttaagcatcgtcgtaccaggttgttcacagctgagcacatgtacctttttatgccatcctttctgggaaagaaaattaaatatgcctatccaaactttctaaaacaaattatcaggtctgctgttttcattttatcttccgtttattctttaaggcacattcttaccaaggtcccatggatttattgtatctgtacaatttctcttttgtcaaatgcagaacacttttcagtctcttgtcacctgaagacagcatgaatgttgttgctatttccaaggttccaatttggaccttctcttcttcctttcacataattttccatagatagtcttctccagccctcgtgccttcacatcctgattctcatgatttctgaagttgtgtttccatcccacatcactcttagaactccagacctgcagagccactgcctgttgaccagtttttccccaggtatcccataggcacacaacattcacacatcaaaactagcttgaatattagcaactcctgcctgaatgtatttcctgctgttgaatttggtcctcaagtgttattgcatccttttcctcattttcttttcagtccacctctctattcccactacctctcagatcctctcaatgtcttgcttagactatggaaaagccttctagctagctgccctcccccacaccagcgtagtttcctccctctctgtatcaccattcaaatgttgttcgaatggtcaattccacattaccatctgaggttgttggctcctgcgtcaagctgtcagtggctctctcctgcctcagaatcttggtcctcctctttcttctccctggaatgtccttccctcctctctctgcctaattaatccacacttagcattgaacttcaggtgccagattctgggaagcaaacctcttttcttttctttttttttcttttcttttctcttttctcttttcttttccctttcctttttcctttcctttcctttcctttcctttcctttcctttcctttccttcctttcattctttcgttctctttctttctgtctttcttttcttttccttcccttccccttctcccttcttttccatcctttctttgtttctctctctctctccctttcccttccttccttccttccgtccttccgtcctttgtcctttgtcctgtctttcgtcctcccctcccctcccatcccctgcttcctttcttctcactctgtcacccaggctggagtgcagtggtgtgatcttagctcactgcaacctccacctcccagggtctaaagccattctcctgcctcagcttgcccaatagctgggactacaggtgtgtgccaccacaccgggctaatttttgtatttttagtagagacagagcttcgccatgttggccaggctgctttcaaactcctggcctcaagtgatctgcctgccttagccttccaaagtgctgggattacacccacccagccagaaacagaccttttctgacacttaactcttctctttccctgtgcccctcttggctttgttgcccttcttatgtgttctccttggagccccagcagtacctccatggcagcattcctaccagtgtttcataactatctgggtctggcctcccccatcctcacaagcagcatgaatcctcttcatggttgcacgtgagtccccagcccaagccgcctgtggttggttatttgttgacttatttctaggatagtggttctcaactgggggtgattttgcccccaggggacatttggcaacttccggagacctttttgattgtcctgactggtggggcagtgctcctgtcatctagcggggagaggcgagggtgctgccaagcaccccattgcacacacgtcggcccacctcatggtccagtcccaaatgtcaagagtgccaaggttgagagacagtgctgtaggacaaagggcaaaattttatggtacttaagacatctcataacagaaaagatgaagttaattaaatatggagttcttaagtaatacgtaaagggttttagtgtcagcttcattttcattctgaactgctctggatctcttggtggcccaatttgattgtttattcacaatctctcttgtgaggcagatctgtgccccaatggttactaatgggttaacaagtacctggagtgagttaggcacaaaactaaaatggtgaggacagtagaactaagctctgcatttattttagaaatttagacatttactttttcttattttcagtgtgcctgatagaaggtgactacccaagcagtttttttgacgaggtatggagatggatggttcctttttttgactcttaaaaagagtttggctggggttggtggttcatgcctgttatcccagcactttgggaggctgagatgggtggatcacttgaggtcaggagttcgagactagcctggccaacatggtgaaaccccgtctctactaaatgtacaaaaattagctgggcatcgtgctgggcacctgtaatcccagctacttgggaggctgaggcaggagaatcacttctacccgagaagcagaagtagcaatgagccgagatcatgccactgcactccagcctgggtgacagagtgagactccatctcaaagaaaaaagaagaaagaatttaaccatataatcctcagaaaaaaaggccttttgttttatgtagatttgctaatgatgtaaattctagtgccacctccaatatttaggtagtgaattagatgggacttttagtgcactggaagttagaatattgaaggatgaattgttgctgacacagaataacatgggattgacctatacaatcaagtaacaggaaaataaaatcctattgtgctttaaatttggcatgtgtcttggcaaagacagaaaacatcagaaaaggttttgatttttccctccagaattagccatataattttttttcttttttattggccatacgatatgaattcttgttttataattatacagttttcaaaaaattattattttgaaagtttagaaatctgagttggagaaagaaacattttaggaaatcttaggaaaaggagacaatgactcatattcttaaatagttcctgttggtatttgcaatttcaaactagtctctggaaaataattatataattgtatggagagagtcaagtctttatctttacccttggggacttcttttggcaaattaaatgatttatacctgaagagacaatttagcttcatgttaaatttcaaaatccaagaaatactttctttccagtagctgtcagattgtagtgacgatcatcagcctttcagatgagtgttattagttcagttttggagattgcctctatgtgtggtactgtcttgtagtttcctgaaagaagattgaagtatttgtacttatttttgtgggttctgtgagataaagtctggcttacagttgatttaaccccttcttatctttgtcttggttacttttggattttgtcagaacagaagttaaagctgcagatactgtattcaaaaaggtccttcaagagctgtaactgtaagggaatggaatgatagatgtatataaatgtggacttgaataaagtatcctttgtatttaaaaatatgcctttcttttaattttttttcagccaagttctatagaaattttagagtattcatcagatagtgaaaaagaagatgatttggaaaatgtcctactcattgattcagaatcccctcacaaataccacgtgcagtttgcatcggatgcaagacagattatggagagactgatagatccaaggacaaaatcaacagagaccattttgcatacacctcagaaacccacagctaagtttcccaggactccagaaaattcagcaaagaagaagcttttaaggttaaattatacccttttaaatactctttttaaatttttctctttctttaaaaacccaaatatctaaaatgttaattttaagatacttgtatatgaagtcctaaattctggagctgattaatggaatgttcatcgaagttgagggtcatggctttactcatgcccagcagatgtgactgcctttcttaatggagatttatttgggttatcaaatgttattgagagtcagtgttctaggtgctgtggagacaagtgtgtaattgttctgttcttgagtaacttataatgtaaaaagggaaatggaagtatgtgtaaatcgtgtcagattacttttatgagagagatctgccagggcaacacttgcaagtgcaaaaaagtatgagagagcagaacccacagacgagacgtatctggtgtgccatgaactacagtgtcagtcaggggctgggctgtggccatggtgagcaaagcaggaaagataacgtgaaggagcctgtagggaccttccccaaccccgtgtaatacaaggtgctctttgttgtttgaccaaacaatgccaagcaaagactcaatgaaggtaagaaagagaggccgggcgcggtggctcacgcctgtaatcccagcactttgggaagccgaggtgggtggatcacaaggtcaggagttcgagaccagcctggccaacatggtgaaaccccatctctactaaaaatacaaaaattagctgggcgtggaggtgcgcacctgtaatcccagctacacaggaggccgaggcaggagaattgcttgaatctgggaggcggaggttgcagtgagctgagatcgtgccattgcactccagcctgggcaacagggcaagactccgtctctaaaaacaacaacaaaaaaaagaaagaaagagaacctgtaggaagcattgccacaaaagcaaaagtaatagagcatttcaaagcaaaggagtttcagtagaaagagtaaatatgatcatgaagagcgtaggtgttggatccacggatgatattgttacatcataagaagaccagcctggcatgcactgaggggagcccagggtctgtggctgaagtagcacacggttcaaggagtgacgacagggtcatggctcttatgtgggaactgggacccaggcaggagggtttcgattactctcttccgtattgccagtcaccttgaaaagatccagcctctagagagggtgcagggaataggagagacagattttgaaaacagtgggggtccgaataaacagagttcgcaccatggctacatcagcatcctggagaagaggtagggaaggaaggtggagaggagagccccagcttgaagacaccagtggaggaaagagcttgaggatgtggccgagtttagtgggatggtcagggcacagagatccatttgtgcctactcaccacgagacaggaggccttatgcccaaagcgaagaagttgtggcctcaaaaaaagaatgtaatttgtaatagtagtagaatgtaatttgtaatagaaggtggtttgtaatagtctctgggaagaaagggagggaagcccattaaaggaattagcatgtttttgttggtgaaggtgatgccatgcgattacagaaagtcatgtccccagccctgctgagggccgaccacttgccaagcactgttcatgcacaggagcaagcaaagtggaatggttgctcataacagagagcaaaggtgaatggagccccgcttgtgtcgagggaagggcaataaggagccaagaagtaaaatagatgtcaactcagagagagaaattttatggagaaaaagcagaaaagggggacagaaaagggtccagaggtgggggaggacatttcagtttgaaacagactcagggaagccctgaggagatgcctcattgagcagctggaagaatggagtgtgcagtggagcaggtgcttttggttttgtatctttggttgacaatcatgaggcttttggccattttcagttagacattatacatcttagtgggactatgggtctgcagtccacgggcaggcctggcgttggagatgtgaatgcgtagactgcagtgtccagatcttttgaagcatgagctaggtcaggtcacaggagatccagtgctgggcgagaggagaacctgtccaaggcctgagtcctgggtgctctgccaaagttggggtgtggagggagagactgctgagggaggagccaaagcaaagggagcatggtgtgctgaggcaagtgaggagagagggtgacccactgtgacagatgctgccagggctgacctctgtgattccacggtgaaaggcagggtgtgcagccgtctcagcggcgtgaccaggcaaagcagactgccatggactcgagagaatggaaagagagaaactgaagacagcacgatggaactctggagaagttttgctttaaggagagcagatcaaagtgtgttagttgaaagtgaatgtgagggtcaaggtttcttattttaaaggtgatagaaatttcatcatgtttgtatgttgataggaaagtccaggagaaaacaggaaactgctgaggcaggggagggagggcacaactgatggagttgtctctgtcgtggtgaagggaggcacaaatgggggtgaccttgtcaggagttcagagtgtgcacccatggccagggcgggcagcacccatgcaggtgccaggatggacctggtgaggagcagacaggccatcctcggacagctgggaaggcagagtccctgctgttacaggcacgatgtatgtggcttgggaactagttctttccgatcaattctattccagtaaatagggcagtccttcattagctgacagggagtatgagaacggagttgtggaggtctgaggagagagaatctgtcacacgggcgtgtagtgggcacagatgaactggagaagggctccagggctgtctgacaggatcaggccctgttgggaagtcgtggtcatggactgagtttgagacctatcagccagtgtggattcgacccttgggctgcccatgtgggcagagcacaaggatggtccaggggcacactaaaaggggttgacaggagttccgagagtagcaataataatgacccgtgaagcctaagctgggtaaagtgagaatgagaatgtgcagtatgtggagcatggtgagttggggtagaactcactgattgaggactggggaaaaggttggtcaaacacttacagagtaacgctactagaggtgatgagctggggcagtaacgatgacgggcgcccagagttgagccgctggagggaggcagttcgggacttcaagattagagtggctgaggcgagtggaggacaccatcttggagctgggcgggcactgacatcagcaagaatggtggccataacccaggagataaggcctctaagggtggcaggtcagtgccagttgccttccctggcattgggcaggctgagttggagctggaacgtaagggaggctaccagatggtcttgaagctgcagtgaagagcaaggccatccttcctggcctttcaggcccagtgagagggtaggggagacaacacagtgctgtttaaggtcaggtcactgtcagggagtcctcaacagaaggtggaggggacgttcctagaagtggctgaagctgctcaaacagcatgcaattgatcattttcttcttgtgatttctaggaacaactaaatgaggatgtctgttttgaagttactatgcttaaatactaaaaatgagattgatgtgcttagggttgttagtctcaggtcttcaaactggaagacttcctgttttactgagctgactagaaaggcctgtgactgccttgtctgcttttgatgaagggatggtggtttgtggtgattaaaaagaacttttttacctgataaagaccaggtagcaaggattgagagaggtagttgacatttgaaggatggagcacattggcccttctctttctggtttgccctgcaggaaatgtcactcagtctctttggacttctttttctttctttctttttttttttttttttaaatttgtggaactattcaaagcataagtaacaaacaccaatgcaaaattgttagatatttaagtgtgttggtaataataaagctatatatatctccccagtttgatggtcaagttgtttttcacagtgcttattatatcttgaaaagacaaaatctacgtctgattggtgtacctgaaagttacagggagaatggaaccatgttggaaaacactcttcaggatattatccaggagaactgccccaatctagcgaggcaggccaacattcaaattcaggaaatacagagaatgccaccaagatactcctcgagaagagcaactccaagacacataattgtcacattcatcaaggttgaaatggaggaagaaatgttaagggcagccagagagaaaggtcgggttactcacaaagagaagcccatcagactaacagagaatctctcggcagacactctagaagccagaatagagtggggggccaatattcaacattcttaaagaaaagaattttcaacccagaatttcatatccagccaaactacgcttcataagtgaaggagaaataaaatcctttgaaacaaatgctgagagattttgtcaccaccagacctgccttacaagagctcctgaagaaagcactaaacatggaaaggagcaactggtaccagccactgcaaaaacatgccaaattgtaaagaccattgaggctaggaagaaactgcatcaactaacgagcaaaataaccagctaacatcataatgacaggatcaaattcacacataacaatataaaccttaaatataaatgggccaaactctccaattaaaagacagagactagcaaactggataaagagtccagacccatcagtgtgctgtattcaggaaacccatctcacgtgcagagacacacataggctcaaaatgaagggatggagaaagatctaccaagcaaatggaaaacaaaaaaaaagcaggggttgcaatccttgtctctgataaaacagactttaagccaacaaagatcaaaagagacaaagaaggccattacataatggtaaagggatcaattcaacaagaagagctaactatcctaaatatatgtgcacacaatacaagagcacccagattcataaagcaagtccttagagacctacaaagagacttagactcccacacagtaataatgggagacttgtacaccccactgtcaacattagacagatcaatgagacagaaagttaacaaggatatccaggaattgaactcagctctgcacctagcagacctaatagacatctacagaactctccaccccaaatcaagagaatatacattcttctcagcaccacatcgcacttattccaaaattcaccacatagttggaagtaaagcattcctcagcaaatgtaaaagaacagaaattataacaaaatgtctctgagaccacagtgcaatcaaatggtactggtgtcccactacgagaatctctgggacacatttaaagcagtgtgtagagggaaatttatagcactaaatgcccacaagagaaagcaggaaagatctaaaattaacaccctaacatcacaattaacagaactagagaagcaagagccaacacattcaaaagctagcagaaggcaagaaataactaagatcagagcagaactgaaggagatagagacaaaaaacccttcaaaaaatcagtgaatccaggagctggttttttgaaaagatgaacgaaattgatagactgctagcaggactaataaagaagaaaagagagaagaatcaaatagacacaataaaaaatgataaagggaatatcaccaccagtcccacagaaacacaaactaccatcagagaatgctataaacacctctacgcaaataaactagaaaatctagaagaaatggataaattccagcacacatacaccctcaccagactaaaccaggaagaagctgaatccctgaatagaccaataacaggttctgaaaatgaggcaataattaatagcctaccaacaaaaaaaagtccaggaccagacggattcacagccgaattctaccagaagtacaaagaggagctggtaccattacttctgaaactattccaatcaatagaaaaagagagaatgctctctaattcattttatgaggccagcatcatcctgataccaaagcctggcagagacacaacaaaaaaagacaattttagaccaatatctctgatgaacatcaatgcaaaaatcctcaataaaatactggcaaactgaatgcagcagcacatgaaaaagcttatccaccacaatcaagttggcttcatccctgggatgcaagggtggttcagcatacgcaaatcagtaaacgtaatccattatataaacagaacaaaagacaaaaaccacatgaatatctcaatagatgcagaaaaggcctttgacaaaattgcaacagcccttcatgctaaaaactctcaataaattaggtatatatcggacatatctcaaaataataagaggtatttatgacaaacccacagccaatatcatactgaatgagcaaaaactggaagcatttcctttgaaaactggcacaagacagggatgccctctctcaccactcctattcaacatagcgttggaagttctggccagggcaatcaggcaagagaaagaaataaagggtgttcagttaggaaaagaggaagtcaaattgtccctgtttgcagatgacaggattgtacatttagaaaaccccatcgtctcagcccaaaatctccttaagctgataagcaaattcagcaaagtcttgggatacaaaatcaatgtgcaaaaatcacaagcattcttatacaccaataacagacaaaacagccaaattatgagtgaactcccattcacaattgcttcaaaaagaataaaatacctaggaatccaacttacaagggatgtgaaggacctcttcaaggagaactataaaccactcctcaacgaaataaaagaggaaacaaataaatggaagaacatttcatgctcttggataggaagaatcaatattgggaaaatggccatattacccaaggtaatttatagattcaatgccatccccatcaagctaccaatgactttcttcacagaattggaaaaaaatacttcaaagttcatatggaaccaaaaagagccgcattgccaagacaatcctaagccaaaagaacaaagctggaggcatcacgctacctgacttcaaactatactacaaagctacagtaagcaaagcagcatgatactggtaccaaaacagagatacagaccaatggaacaaaacagagcctttgaaaataataccacacatctaaaaccatctgatccttgacaaacctgacagaaagaagaaatggggaaaggattccctatttaataaatggtgctgggaaaactggccagccatatgtagaaagctgaaactggatcccttccttacaccttatacaaaaattaattcaagatggattaaagcattaaatgttaaacctaaatcttaaaaaccctagaagaaaacctaggcaataccattcaggccataggcaagggcaaggactttatgtctaaaacaccaaaagcaatggcaacaaaagccaaaattgacaagtgggatctaattaaactaaagagcttctgcacagcaaaagaaactaccatcagagtgaacaggcaacctacaaaatgggagaaaatttttgcagtctacccatctgacaaagggctaatatccagaatctataaagaacttaaacaaatttacaagaaagaatcaaacaacccaatcaaaaagtgggcaagggatatgaacagacagttctcaagggaggacatttatgcagccaatagacacatgaaaaaatgctcatcatcactggccatcagagaaatgcaaatcaaaaccacaatgagataccatgtcacaccagttagaatggcgatcattaaaaagtcaggaaacaacgggtgctggagaggatgtggagagaaataggaacacttttacactgttggtgggactgtaaactggttcaaccattgtggaagacagtgtggcgattcctcaaggatctagaactagaaataccatttgacccagcaatcctattactggatatatacccaaaagattataaatcatgctgctataaagacacattgacacgtatgtttattgtggcactattcacaatagccaagacttggaaccagcccaaatgtccttcagtgatagagtggattaagaaaatgtggcacatatactccatggagtgctatgcagctgtaagaaaggatgagttcatgtcctttgttagggacatggatgaagctggaaaccatcattctgaggaaactgtcgcagggaaggagaaccagacaccgcatgttctcactcatatgtaggagttgaacggtgagatcacttggacacaggaaggggaacatcacacaccggggcctgtcatgtggtggggggatgggggagggatagcattaggagaaatacctaatgtagatgacgagttaacgggtgcagcacaccaacatggcacgtgtgtgtgtgtgtgtgtgtgtgtgtgtgtgtatatatgtgtgtgtgtatatatatatgtatatttaacaaacctgcacattgtgcacatgtattccagaacttaaagtataataaaaataaaccaaaattttaaaatattgtatttacagtcattttaattgtttattctttacctggttgtatagcttattaaaaatattttgactgtaaatcagttggaatatttttgaatctttatccttctttacttctccatattgtttttatagaaatgtttaccaatgtcaaattgataccagtcatcttttgagataggttaccagtctgttaattttatagaaaagataattaggatatcttaacttgctgagtgaattcatcatatttttattccatcggagtttggcctttataaataacttatctggctacgttcaaaagagttaatttggatatagatggcagggccttcctgaacttttggtatgacttaattttttttaacatgagatatgtttttactagaaataggattgttgattagaggacatggtgtttcctaagctcaagttcttaagttcaagtgcatgtgactggaattccctgcataacaggccctaatggccaaactcaggtgagatgcagattttttctgagggctccagatactgctgtgtgtagagagcgcctgtgcatgtttactgttgcttttacctttcatcctgtaatctgcacagttttcttacgaggttctaggcttgactttaaccagatagttttttcagagttcattttgcctttttttttttttttctgtaaggtcacagcattgaaaagcaacatttggcaaataatgttctagatagttgggcaaagaatacagcatttgcttcttgtatttattgtgcatatcattttaaataatactgtttaagaggtgctaggtatattatcaagactaagagtttgaactctggaaccagactgcctaggcgtgcatccagctacaccactcattagacatttcaccttggacagatgtttaacatcttggtgcctcagtttgtcatctataaagtggaataataatagtacctacttcacggtgttgtgtaaaggggaagcataaacgagttacttcatgtaaacagaatgatatgaagaagggcttaataggaagtagaggttgacatgtagaggtgctatggcatatttctgagcataagaggttttaactttttttctgttacatgtactacacgcaagtatattcagaaatagtaacctataggaaaacatactaggtgtctctataggtattaatactagcaatattatgtatttattaaaatatttccatcataatggaaagatctgtatataggctgcaagtgaaaaacataacaaaaacagttacaccaatcatgggcattttttgaaggtttactaaatgccacgtgctgcactaagtccattctggttttaacagctagttcctcatctggttagttacgtaatgctggagaagtttcttaacctctctctaaattctggttttatcatctgtgcagtgggtactgatatctgttctttcagtctcaaagggatattatttgaataaaggtaatgtagtgaaatgattaatgaattggtaacaagataataaacttatgagataatacattgatacccgatatagcatgtagctatagtggtaattaacaactgatcttaatttttcttgaaattatagttatgttagtagttgataacttctctttctctctacatatgcatgtatttatttacttataatttacatacacctatatatttataagcataaatatatctcagtaagtatatgtgttcattgataggttaatgctcttctgcagtgcctgcatgtctgtcgttataaattgtctttctgctatacatggaagttttcttttttataacattggtatctttgctgtgtgtttgtgattgatactcaaatatctctggagtccaaataagggacccatacccaagtgctcttatttgagtgttctatcaacagttggcaaagttattcttgactggaactctgagcccactttacatttctttgctcctatgtgctgagctcattgggagctttcccacctccatggcagcactcatagctgtccttgtgtccctggtacctaacgaagtgctaggtgccagcatatagcaggtggtaagtaagcagtgcttgttttaggattgaataaatgaactaagaaagaatagaaaaataggtaagctgatatttagctgtcatatttccaagaatgtgatgtttttggacataatattagcccatatttctaagaatcagaaaaccaagcttctaagaaaacaaaaaactgacttatgaggatatggcctctgggaagataatgtggtaacaaatatacgttaaaattttgcatgttttatctgtttgtctctggttggggggtatacaatataaatgttccagtgattctgaagttttccttttaactaaacttaatacattataattcattaaacagaggtggactagcagaaagactaaatggactgcagaatcgagagagatctgctatttctttgtggagacatcaatgtatttcttaccaaaagacactttcaggtaaggcttgtgcaggaatctgagacaatgtgtaaaaaaatattttagttaaaagaattcttacattaaaatatatgaagttaattgttaatattttcatgactttttaaaaattttttccaacattctaattttaacatataaaaactatatatagtaaatatatttaacttgatgagtttaaaaataagcatactcttatgaaaacatcaccacaatctgtgctataaatctacccttgacctccaaaaattttgttctattcttatcattaagagcactctaccctcttagcaaaatttattttgttttatttcattatttagagacagggtctcaccgttgcccaggctggagtgtagtgacataatcatgtagcctcaaactcttgggctcaagcaaattctctcacttcagcctcccgactggctaagaccacaggctttttccaccgtgcccagctcctcttagcaaaattttaagaatacaatacagtatgttaactataggcatgattctgtactgcagatctctaggactggtttagcttatataatcaaaacgttgtaccctttgacaaatacctctctattggcagccaccattgcagtctctgcttctgtagccagagcactattagtcaagaaaaagagataaaagatatccaagttggaaagcaagaggtaaagctgtctccgtttgcagataacatgatcttatatctagaaaaccctataagacaccctgcccctgccaaaaaaaagttagaactaataaatgaattcaacatagtagcaggattaaaaatcaacataccaaaatcaattgcatttccatatagtaacaatgaaatttctgtatattaacaacgagatattttcttttctcttggaaattaagaaagcagtctcatttacaataacatcaaaaagaatgaaattcgggaccgggcatgatggctcacgcctgtaatcccagcactttaggaggctgaggcgggcagatcatgaggtcaagagatcgagaccatcctggccaacatggtgaaaccccatctctactaaaaatataaaaattagctgggcgtggtggtgcacgcctgtagtcccagctacacgggaggctgaggcaagagaatcgcttgaacccaggaggcggagtcttcagtgagccaaggttgtgccactgcactccagcctggcgacagagtgagactctgtctcaaaaagaaaagaaaaagaatgaaatacttaggaataaacttaatcatggatgtcaaggacttgtactctgaaaactgactttttttttttcaggtgtcatataggtctcagaaattattccaacaaatgagtttattcctccaaggtctaatgactgaaaactcttgtttttcaacaaattgcttgatattgaaaagattccacatgtctagaaaagcctcctctcctcctaaacagtgctgatttggtagttttttcctgtgtgttccctccatctagagtaggggatgggtaggtgtgggcccagtcatgtattccaaaccaactattattagtctttcctgagggatcattgggatatacattttaataggttcccaggtggtttctgcacatgctagaatttaagaaacattattcttagagttgatctccccgttcccaataatatattcttctaaatagatcactcaactgttatgttctcaactattatattacacatttctttagaagacttttcaattcttatctcatttattccttttaaaatcctttccgaggccaggtgtggtggctcatgcctgtaatctccatcctttgggaggccaagacgggaggatcacttgaggccaagagttcaaggccagcctgagcaatgtagtgaaacccattcgctgcaaaaatttaaaaattaactgtacgtggtggcacacgtctatagtcctaactactcgagaggctgagatgtgagaattgcttgagcctaggagttctaggttacagtgagctatgatcgcacctctgcacaccagcctgtgtgacacagcaagaccctgtctctaaaaaaatacaaaaaactcctttcccagctgtcgcttagcaattgccttctctcacattcttgcattaaagtactataatatgaaatacatatatatgtatcaggatgacctaatatatatgacccaagaatactttttctttttttattttattttacctttttttttttgagacagcatctcgctctgtcacccaggctggagtgtagtggcaagatcctgactcactgcaacctccgtatcctgagttcaagcgattctcctcctcaacccccggagtagctgggactataggtgcctgccatcacgcctggctaatttttgtatttttagttgagatggggtttcgccatgctgggcaagctgatctcgaactcctgacctcaggtgacgcacccacctcagcctcccaaagtgctgggattacaggtgtgagccatcatgcccagtcactttttcttctatacatatctgtgggtcaatccattgttatacttacgactttgtttcttggcgtttttttatattaatgattatgacattaaataataatctttacaactcatttgaccaccctgaaggccaggcaaacataaagtttgcctggtcttattatttagagaagtcttttttattattattattatattttaagttttagggtacatgtgcacaacgtgcaggtttcttacatatgtatatatgtgccatgttggtgtgctgcacccattaactcgtcatttagcattacatatatctcctaatgttatccctccccgctcccccaaccccacaacaggcctcagtgtgtgatgttccccttcctgtgtccatgtgttctcattgttcatttcccacctatgagtgagaacacgtggtgttcggttttttgtccttgcgatagtttgctgagaataatggcttccagcttcatccatgtccctacaaaggacatgaactcatccttttttatggctgcatagtatttcatggtgtatatatgccacattttcttaatccagtctatcattattggacatttgggttggttccaagtctttgctattgtgaatagtgccacagtaaacatacgtgtgcatgtgtctttataacagcatgatttataatcctttgggtatatacccagtaatgggatggctgggtcaaatggtaattctagatctagatccctgaggaatcgccacactgacttccacaatgattgaactagtttacagtcccaccaacagtgtaaaagtgttcctatttcttcacatcctctccagcacccgttgtttcctgactttttaatgatcaccattctaactggtgtgacatggtatctcattgtggtttcgatttgcatttctctgatggccagtgatggtgagcattttttcatgtgtctcttggctgcataaatgtcttcttgtgagaagtgtctgttcatatcctttgcccacttgttgatggggttgtttttttcttgtaaatttgtttgagttcattgtagattctggatattagctttgtcagatgagtagattgcgaaagttttctcccattctgtaggttgcctgttcactctgatggtagtttcttttgctgtgcagaagctctttagtttaattagatcccatttgtcaattttggcttttgttgccattgcttttggtgttttagacatgaagtccttgcccatgcccatgtcctgaatggtattgcctaggttttcttctagggtttttatggttttaggtctaacatttaagtctttaattcatcttgaattaatttttgtataaggtgtaaggaagggatccagtttcagctttctacatatcgctacctagttttcccagcaccatttattaaataaggattcctttccccatttcttgtttttgtcagctttgtcaaagatcagatagttgtagatatgcagcattatttctgaggcctctgttctgttccattggtctatatctctgttttggtaccagtaccatggtgtttttgttactgtagccttgtagcatagtttgaagtcaggtagtgtgatgcctccagctttgttcttttggcttaggattgacttggcaatgcgggctcttttttggttccatatgaactttcaagtagttttttccagttctgtgaagaaagtcattggtagcttgatggggatggcattgaatctataaattaccttggacagtatggccattttcacaatattgattcttcctacccatgagcatttaatgttcttccatttgttatttagaatttagggaagtcttaatagcacattggcttagacacaaaaaaagaatttaatgggacttgtaattgaatgccacagggaccatgcttcaggcatattggttggaaaggctggcggtcattctctgtgtggtaactctcctcttcaagtccgataaaaagaatgctttctttccaatattttaccagaagtgcccaaaatgactttcattggtctggtagagacaggaatccctgcttgaaatcatcctaatcactctggccaacatgggctacagtcagtaacacactaccatccatatccttaacttgtgattattttatttccagagttatttaataaaaatcagcaggaactatttgtaattctacagtatgttatctcattttagtctttcagtgattcttcatgttctcctatttataagtatttgcatgtgtatatttaacctctcaaatgtgaatgacctggaactggagtgaccactgtttcttataatctacttccctccatctctaaatagtttctgtttaatttgtgtgtcactcattgctttcaatttagtttgtggttctatgcattataaacttcttttgttctgcttgaaccagaaaaatatttccttgccacttaaattctcaaatggctcctccttcttttgactcccttcttttgaagtaatgatatgagagaatggcaagcttgaatttctttcaactggatataaatatttgcattattgggtttcaggaaggccactttgagttcttagttacaacattagctttgtgttgggttgtggtggatggtgaactatcagatggaaaagaggagcatggcacacaggactctggctactggcggcctaaaaggccagaacctgaagatatcatttgcatactgcgttgacattcatgcagcgcttttgtttcctttttccacatgaggagatggaatgctaattctgtgaggactcttagagacattccagtccaagctcctctttggcagattgcctagaggagggaggtgacttgctctgattatctagccaaggaagagacagggccaaagccaggcctcctggttcccagtgccatgctctttcaaaccctgccactcttctgccatatgaaaataatcattttaatcctctgccagtttcctcttgatcttgctagtggagaataaccaaatagtccaaattggactttgcatgtttagttcaggtagctgtcttgaattttgctgatgttattatagcattgacaaattgtaaatatcttccaagtaggagcaaaacatgggcgaactttgaattggatcataaattcttaaatagtttgggttctgtctgtcctgtttcccccttcaacatgatcctcattgttgtatcacatttggaggtttgatgttggtgggtacaatgctgaaggcttactacgtattaaatcatttcatatgcaaactaatcttctagaagagtttgctttccttattttccagataaaaaaaactgtaggttgagtatatgctatagatgactaaggccagatttgaactgtcaagtcgaagtttgttaatctctacagaccttcattagttactctgtttgggctggagaaagttaggcttaagaagacaagggattgaggagttagcaaaattagaagtattaatacaaatgtttttcttttgaaaaaaatcttacaaaatgtaggtctgtatcacattcttgagacagcactaattggtgaagcataggacataggtttgaaggttgcagagactgtgtaaattgtggaactgtataggatgtcctaaagtcttatgattttgatgggaagtggcagattgtcttcttaattattgatattaatacacatagaattcactaggcgttgtcatcccggttactcactatagtgaattgatcaaattgtcaagtatgtagttgacagagtgtcttctgcttctctggatagaaaaataccaagttaaacatgtatgactggtggtccagaatgaagggagaaaaaggtgattttttttgtttggctcaaaacaaaaacataacttacttgaaatgttccttacaatatcacttcttaaattttgttctagatattaagtgtagcatgtcaaactaagattctccttatttatctgcttcagagatgagaaattatggcttacaaaattgatctgtcgattataatgatttagcttgagatctttctttccacgtgtcttccatttggggagtatttaattaccccacagttgagaggtctgtttttgtctgtatatttattcaagttgttgtgtatgtcagtatcccactcccttatattgctgggtactattgcatggtacgaatgtgccacagtttgtttaactgttcgttgactgaagggcctttgggtcgtttccatatttgagtcattacaaataaaacgtgctgtgaacatttgtataccagtttttgagtgaacatatgtttttatttttctgggataaatgatcaaatgatttaaaatgttggaatgtctctaacacattattctgcccgtttttgttttgttttgttttgttttttttctttgaggcagagtctcgctctgttgcccaggctggagtgcagtggcaccatctcagctcactgcaagctccgcctcctgggttcacaccattctcctgcctcagcctcccgagtagctgggactacaggcacccgccaccacgcctggctaattttttgtatttttagtacagatagggtttcaccgtgttagccaggatggtcttgatctcctgacctcgtgatcctcccgcctcggcctcccagagtgctgggattacaggtatgagccaccatgcccggcctattctgcccttttaaaacactttgtatttaaaaataattgtagattgacatgcagttagaaataatactgagagatcccttgtaccatgcccccagtttcccccggtaatgacatcttttataactgtagaatgacaggacagccaggatgatgatctccaatacagtccattgaccctgctcagatttcaccaattttacatgcatttatttctgtgtgtattttttgttttatgtaatcttatcacctgttactgtggtctgaatttttgtatgctcccaaaattcatgttgaaacctaatcaccagtttgttggtattaggaggtaagtaaggcttttggaaagtgattaggtcatgaggtggagccctcatgaagggaattagaagagaccgtagagagctagctcatccttccactgtgtgaggaggatacagcaagaagaatccaactgtgagaatgtaggctctcactaggcacagagtctgccagagcgttgatcttggacttcccagcctgcagaactgtgagaaacaaatttctgttgcttcgaagccacacagctctggtttttttgttgtaacagccaagatggactaagatacttgtttagattcatgtgactatcacatagtccagacacagaagggtccatcaccccaaggattctcatgccaccctttatagccacagtcatctctttcccactctcctccctgatgccttgcagccactaatctgttaaacatttccatagtttgttatctaaaaatgctcacacctgtaattccagcactttgggagaccaaggccggcagatcacaaggtcaggagtttgagaccagcctggccaacatggtgaaaccctgcctctactaaaaatacaaaaattagccaggtgtggtggcaggcgcctgtaatctcagctacgcaggaggctgaggcagagaattacttgaaccccggaggcagagtttgcagtgagccgagatggcgccactgcactccagcctgggtgacagagcaagactctgtttcaaaaaataaaataagttatagaaatggaataatatagtttataaccttttgggattgagatttttcacttagtttaattccccggagatttatccaagttgttgtgtatgtcaataacccactccatattgctcggtagtattccatggtacaaatgtgccacagtttgttgaactatttgttgatgaagggcctttgggttgtttccatatttgagtcattaaaaataaaaggtgctgtgaacatttgtgtaccagtttttgagtgaacatgtttttatttttctgggataaatgatcaagattgcgattgtcaggtgttatggtaagggcatgttttgtttcattaaaaaaggcataagaataccaaatatttcaatgaattctttttttttatactttaagttttagggtacatgtgcacaacatgcaggtttcttacatatgtatatatgtgccatgttggtgtgctgcacccattaactcgtcatttaacattaggtatatctcctaatgctatccctccaccctgcccccaccccacccacaacaggccctggtgtgtgatgttccccttcctgtgtccatgtgttctcattgttcagttcccacctatgagtgagaacacgcggtgtttggttttttgtccttgcgataatttgctgagagtgatggtttccagcttcatccatgtccctacaaaggacatgaactcatcctttttttatggctgcatagtattccatggtgtatatgtgccacattttcttaatccagtctatgatttttggacatttgggttggttccaagtctttgctattgtgaatagtgccacaataaacatacatgtgcatgtgtatttatagcagcatgatttataatcctttgggtatatacccagtaatgggatggctgggtcaaatggtatttctagttctagatccctgaggaatcgccacactgacttccacaatgattgaactagtttacagtcccaccaacagcgtaaaagtgttcctatttcttcacatcctctccagcacctgttgtttcctgactttttaatgatcgccattctaactggtgtgacatggtatctcattgtggtttcgatttgcatttctctgatggccagtgatggtgagcattttttcatgtgtctcttggctgcataaatgtcttcttgtgagaagtgtctgttcatatcctttgcccacttgttgatggggttgtttttttcttgtaaatttgtttgagttcattgtagattctggatattagccctttgtcagatgggtagactgcaaaaattgtctcccattctataggttgcctgttcactctgatggtagtttcttttgctctgcagaagctctttagtttaattagatcccatttgtcaattttggcttttgttgccattgcttttggtgttttagacgtgaagtccttgcccatacctatgtcctgaatggtattgcctaggttttcttctagggtttttatggttttaggtctaacatgtaagtctttaatccatcttgaattaatttttgtataaggtgtaaggaagggatccagtttcagctttctacatatggctagccagttttcccagcaccatttattaaatagggaatcctttccccatttcttgtttttgtcagctttgtcaaagatcagatagttgtagatatgtggcattatttccgagggctctgttttgttccattggtctatgtctctgttttggcaccagtaccatggtgtttttgttactgtagccttgtagtatagtttgaagtcaggtagcgtgatgcctccagctttgttcttttggcttaggattgacctggcaatgcgggctctttttggttccatatgaactttaaagtatttttttccaattctgtgatgaaagtcattggtagcttgatggggatagcactgaatccataaattaccttggacagtatgcccattttcccaatattgattcttcctatccatgagcatggaatgttcttccatttgtttgtatcctcttttattttgttgagcagtggtttgtagttctccttgaagaggtccttcccatcccttgtaagttggattcctaggtattttattctctttgaagcaattgtgtatgggaattcactcaggatgtggctctctgtttgttattggtatataagaatgcttgtgatttttgcaaattgattttgtatcctgagactttgctgaagttgcctgtcagcttaaggagattttgggctgagacgatgggtttttctagatatacaatcatgtcatctgcaaacagggacaatttgacttcctgttttcctagttgaataccctttatttccttctcctgcctgattgccctggccagaacttccaacactatgttgaataggagtggtgagagagggcatccctgtcttgtgcagttttcaaagggaatgcttccagtttttgcccattcagcacgatactggctgtgggtttgtcatagataggtcttactgttttgagatacgtcccatcaatacctaatttgttgagagtttctagcatgaaggttgttgaattttgtcaaagggcttttctacatctattgagatattcatgtggtttttgtcgttggttttgtttatatgctgggttacgtttattgatttgcatatgttgaaccagccttgcatcccatggatgaagcccacttgatcatggtagataagctttttgatgtgctgctggattcggtgtgccagtgttttattgaggatttttgcatcgatgttcctcagggatattggtctaaaattctcttttttggttgtgtctctgccaggctttggtatcaggatgatgctggcctgataaaatgagtgagggaggattccctctttttctgttgattggaatagtttcagaaggaaagataccagctcctccttgtatctctggtagaattcggctgtgaatccatctggtcctggactttttttgtttggtaagctattaattattgcctcaatttcagagcctgttattggtctattcagggattcaacttcttcctggtttagtcttggaagggtgtatgtgtccaggaatttatccatttcttctagattttctagtttatttgcgtagaggtgtctatattattctctgatggtagtttgtatttctgtgggatcggtggtgatatcccctttatcaatttttattgcgtctatttgattcttctctcttttcttctttattagtcttgctagtagtctatcaattttgttgatcttttcaaaaaaccagctcctggattcattgatttttttgaagggtttttgtgtctctatttccttcagttctgctctgatcttagttatttcttgccttctgctagctgttgagtgtgtttgctcttgcttttctagttcttttaattgtgatgttagggtgttaattttagatctttcctgctttctcttgtgggcatttagtgctataaatttccctctacacactgctttgaatatgtcccagagattccggtatgttgcgtctttgttctcgttggtttcaaagaacatctttatttctgccttcatttcgttatgtacccagtagtcattcaggagcaggttgttcagtttccatgtagttgagcagttttgagtgagtttcttaatcctgagttctagtttgaactgtggtctgagagacagtttgttataatttctgttcttttacatttcctgaggagtgctttatttccaactatgtggtcagttttggaataggtgtggtgtggtgctgagaagaatgtatattctgttgatttggggtggagagttctgtagatgtctattaggtccacttggtgcagagctgagttcaattcctgggtatccttgttaactttgtgtctcgttgatctgtctaatgttgacagtggggttttaaagcctcccattattattgtgtgggagtctaagtctctttttaggtctctaaggacttgctttatgagtctgggtgctcctgtattaggtgcatatatatttaggatagttagctcttcttgttgaattgatccctttaccattatgtaatggccttctttgtctcttttgatctttgttggtttaaagtctgttttatcagagactaggattgcaacccctgcctttttttgttttccatttgcttttagatcttcctccatccttttattttgagcctatgtgtgtctctgcaaatgagatgggtttcctgaatgcagcacactgatgggtcttgactctttatccaatttgccagtctgtgtcttttaattggcacatttagcccatttacatttaaagttaatattgttaggtgtgaatttgatcccgtcattatgatgttacctggttattttgctcattagttgatgcagtttcttcttagcctcgatggtctttacaatttgtcatgtttttgcaatgcctggtaccagttattccttttcatgtttagtgcttccttcaggagctcttttagggcaggcctggtggtgacaaaatctcccaacatttgtttgaaacaattttatttctccttcacttatgaagcttagtttggctggatatgaaattctgggttgaaaattattttctttaagaatgttgaatattggcccccattatcttctggcttgcagagtttctgcaaagatgtcagctgttagtctgatgggcttcactttgtgggtaaccccacctttctctctggctgcccttaacattttttcctccatttcaactttggtgaatctgacaattatgtgtcttggagttgctcttcttgaacagtatctttgtgctgttctctgtatttgctgaatctgaattttggcctgccttgctagattggggaagttctcctggataatatcctgcagagtgttttccaacttggttccattctccctgtcactttcgggtacaccaatcagacgtagatttggtcttttcacatagtcctatatttcttggaggctttgttcatttcttttaattcttttttctctaaacttctcttctcacttcatttcattcattttatcttccatcactgataccctttcttccagttgattgaattggccactgaggcttgtgggttcgtcctgtcgttctcttgttgtggtttttagctccatgaggtcctgaaatgacttctctgcattggttattctagttagccattcgtctaatcttttttcaaggtttttaacttctttgccatgggtttgaacttcctgctttagctcggagtagtttgatcatctgtagccttcttctctcaacttgtgaaagtcattctccatccagctttgttccgttcctggtgaggagttgcgttcctttggaggaggagaggctctctgctttttagaatttttagtttttctgctctgttttttccccatctttgtggttttatctacctttggtctttgacgatggtgacgtacagatggggttttggtgtggatttccttttctgtttgttaattttccttctaacagtcaggaccctcagctgcaggtctgttggagtttgctggaggtccactccagaccctgattgcctgggtatcagcagcggaggctgcagaacagccaatattggtgaacagcaaatgttgcagcctgattgtttctggaagttttgtctcagaggagtacctggctgtgtgaggtgtcagtctgcccctactcaggggtgcctcacagttgggctactcggaggtcagggccccacttgaggaggcagtgtgtccgttctcagatctccagctgcgtgctgggagaaccactactctcttcaaagctgtcagacagggacttttgagtcagcagaggtttctgctgccttttgtttggctatgtcctgcccccagaggtggagtctacagaggcaggcaggcctccttgagctccagtgggctccaccccgtttgagcttcctggctgctttgtttacctactcaagcctcagcaatggcgggctcccctcccccagcctcacttcccccttgcagtttgatttcagactgctgtgctagcaatgagcgaggctctgtgggcgtaggaccctccgagccacgtgcgggatacaatctcctggtgtgccatttgctaagaccattggaaaagcgcagtattagggtgggagtgacccgattttccaggtgccatctgtcacccctttccttagctaggaaagggaattccctgaccccttgtgcttcccgggtgaggcgatgtctcgccctgcttcggctcacgctctttgtgctgcagccactgtcctgcacccactgtctgaccatccccagtgaggtgaacccggtacctcagttggaaatgcagaaatcatatgtcttttgtgtcgctcacgctgggagatgtagactggagctgttcctgttgggccatcttggctccacccctctgcagtgaattctaatacatctttctaggcttaagaaatttttttttaacatctttggtatgtggatgtcagtttttcctttgttccctcctgagtagctgactttgctgggctgttttataactcctacttgtaacttttaagaatcaatgttatcttccttgttggtggcttctagtacatttcagtataaaagacatatatctcaagattctttgtgatacactgagaaggtattgagtttgactttaaaagaacagccaaaggccgggtgtggtgtctcatgcttataatcccagcaatttgggaagccgaagtgggtggatcacaaggtcaggagttcgagaccagcctggccaacatggtgaaaccccgtctcttctaaaaatgcaaaaattggcatgttgtgggctcctgtaatcccagctactcgggaggctgttacaggagaatcgcttgaactgggaggtggaagtttcagtgagccgagattacgccaccacactccagactaggtaacagagcgagactctgtctcaaaaaaaaaaaaaaatagagcagcaagagccaggcacagtggctcatgtctgtaatcccagcactttgggaggctgaggcaggtgatcacttgaggccaggagtttgagaccagtctcaccaatatggcgaaaaagtactaaaaatacagaaaaactagccaggtgtggtggttcacgcctacaatcccagctattctggaagctgaggcatgagaatcacttgaacctgggaggcagaggtttttgtgagccgagatcacgccactgcactgctatctgggcaacagagcaagaccctgtctgaaaaaaaaataaaaataaaaaaataaaagagcagcaaaaagcacagatgttgcacccaaaggccttgcagagaatgcagtttgatgaaatggcatggggtgggcaggggagcccagatcatgcagggcctggaggccttggctgggtttcacttccaaggtagtgccttggaaacctgcactttaaaatgtagctgtggcatagagaatggacagctatagaggcaaggggaaaatacgttctatttatcttcacgaatcattgtatttttctttttttaaaagaggaaacagtttccaacattgctttgctcattatctgcatgatggtgaacagtgattactaagtgatactcaaagcattttgcatgtatattaatcacaattacccttccagttaggtcctgctctccttattttagagatgaggacaatgcagacacaggagaatatggatgggtacagccttgtgtgcctgccagtgggtagcagagccagatttacattgggcagcctaacttggtggcccatgttcatagcctacttgttttaggggcaggtctgggcagaactgagttcaggagatgtgagtgcagcagtggttgcaccctggctccgttgtttgatctctgtttagtaacagggtgacaatttttttcacaatatgtttgatatcatagtttttaaaactaaaagtagttacaaatgttcttttatttttttgagtagggtctccctctgttgcccaggcatgagtacagtggcaccatcacaattcactgcagccttaaccgcctgggctcaagggctcctgctacctcaacctccagagtggctgggactacagtcacatgccaccacacccagctgtttaaaaaaaaatttcttttttttctctacagaaatggagtcttcctatgttttccaggctggtctcgaactcttggcctcaagggaacctcccttctcagtctcccaatgaattggaattacaggcgttagccaccatacccggacccttagatgttcttaaatgcaaaaaaccttctttgttatacaggaagagagtaaagaaaaaagaagaaccagtgataacaaagaaattgatgggcttcagataaattatttttcatgatgaaattttttgggggaaagggaaaggtcttgctctgttgtgcaggctggagtgcagtggcgcagccttggctcactgtaacctccgcctcctgggtccagacaatttttgtgccttctgagtatgctgggattacaggcgcctgccaccacccctgggtaatttttgtatttttagtagagcctgcctcggcctcccaaagtgctagaattacagacattaaccaccttgcccagactttaactgcctattcttaagcaagatactttatttttgaaatttaagatcacttccgttagctaatttaaaaaaatgattcttatttaaattgtattatagagggtaagcaaccaagtaatattctcagtgtttttcaatcatccagatgaaaattttatatatgctcatatttctgtgtttattcttgttgtgtgaagtaaatgctttactggtcactatatctggtggtggagatgggatagtgggaagtgagggtcacaggtaccaagctggcaggtcacattcatttactcagcagttgctcagcaggggcctccagtgtgccaggctccttgctgggctctaaagatacactgtgaataagcaagatctggtcactgcacccttagaccttctcttttagtggactagatggatgacaagcagagagagaaaatcgggacaggttagtaaagtgcagggtctgcatgggcatggtaggagctgtgcaggacaggctatggaagcgagcttcatatttacagtgggtaaatacaacctctgtctagtttctcagccagaatatcaatgtgaggtgcctaaacagttttgggatggtggaagttttgctatctatttgttcttgctagaaaaattatattttgtgtaatagattttaaatgttccatattttaaatattttttcttgtataaaattattatatttgaaagatttctttaggttattattgaagttcagtaagaagcagtttatttagtatacattatattcacacagtaaaaagtgagtacaacttaaacctttggaaaattgagggtgggacaaaattttggtttaggagtacctttgtcatgttaatatttgcttttattgaattatcattttgtattgaaatataagaaactacagaaaacacagatacacagcttaacaagtgttatatagaaggtacccgtattactaccagtacttaaagaatagaaataggctgggcacggtgactcacgcctgtaatcccagcactttgggaggctgaggcaggcagatcacgaggtcaggagttcaagaccagcctggccaacatggtgaaaccctgcctctactacgatacaaaaaaaaaaaaaaattaaccagccatgggggcacacactcctgtaatcccagctacttgggaggctgaggcaggagagtcacttaaacccgggaggcggagtttgcagtgagctgagatcatgccattgcactacagcctgggcaacagggcgagacacagtctcaaaaaaaacaaagcaaaacaaaacaaaaaaccatagaatagaaatagatggttttctattcagtattttttaactcactacagcaatattgtaaattgatgccttatgcctttttattctttcttgccaaatggctataatattttggcttatcttttttttttttactttgttccttactactttcattcaacatttattaagcaacaagtagattatcatcattgatagaactgtctgattccatcataacattataattcatttttccttgcttccttttgtaagatattaaagttttattctttagaaggaaacaaaaccatattttacacttgaagatgttttaataactgtcttagtctgttttgttttgccataatagaacaccacagactggataattgataaagaaatttatttctcacctgcctggaggctgggaagcctaatatccgcctcaccagaagggaaaagaagtgtgagagagggagaggaaggtggtagaactcatcctttaatgaggaaccaactcccatgataatgacattaatccatagagggcagagcctcaggatctagtcacctcttaaagatcacctttcaacactgctgtgttggagattaagcttccagcacattaactttgggggacacattcagaccatagcaataatctgtaactttccatttattgaagtacgttttgaagaattagaagagagaaagaaacaaagcctaagagaataaagtattatttcttaggatttgtaaaggagaaaaactctgatgacttattccttgaataatattgtatttatacaatttcaagagaaactgaaatcatatactatttccatattctgatgattatgattaaatactcaggataacactcctggacacttctaatgcttttagactttcttcacattatataatgggttggaaacattcataaatattataaatactttataaatattataaatataaaataaattgtcagaagcagttaacaaggattaccattggaaaagggttgggacagggttttttttttttaaatatgccttttacaaaaaaagaaatttgtcaaaatcaaatattgtttttaccattatagggagatagatgtgaagtgatagaaaactccaccctgaattttacttatgaagtactaaaaaattaatacttctatgtcaggaagtgaaaaattcaataacaagactggtttttatagtgcggtagttttccagaatgaggagtgtagtgatcctttttccttggacaagattatctgccaacagcctgacaggcttggtatgtaatctccaatacttctgcaccctccttgttacctgtgtgaaccttaggtgagcgtctctgtgcaccagatgcaggggaacggggaggctggggcgtccctgaccgtcaggctacctcaggagcagtggatgtggtgccccacagtgcagcccacagagtggggtttcctcggtcttgtcgcaagcgtgtagccagaaatctggtcccccacctatttcttactgcttccaggaactcctctgaggctgggggcccctgagatggggttgtggtccagggtcaccacttgagtggctgggagaagaagaatgaaagttggggtcggcgatttcttttttctttttttctttttgttttgagacacagtctcactctgtcaccccaggctggaatgcagtggcacaatctcagctcactgtaacctctgcctcccgtgttcaagtgattctcccgtctcagcctcctgagtagttgggattacagacgtgcgccacgacgcctggctaatttttgtatttttttgtagagacgtggtttcaccacattggccaggctggtctcgaacttctgacctcaagtgatctatctgccttggcctcccaaagtgctgggattataggcatgaactaccatgcccagcctgggatcagcaatttctatacagaaagtggtgtgagcaggagggtgaacaaagaatcctgtgtagatacgtgggtgtctacaagatttcactaatttctttgatgcggtattttccaataattaaagcctaacttggggtagaaaatggtagactggtcattcctaccaaagcaagtcagttggtaaaataagatccctttatttaattaaaaaataagtgttagaaaatacatatgatctaatctaagtctcctagtattatgtatttaaacccagaaaaggtaggtgtatggtgagctgcttatttagccaattcttggcaatattttttgcctttaaaatctttagtttctctggggatttttttatgtaacatgaaacattattaaaaacaatttgtttttttagatttaagaaatgcgaataacacggattaaagaagggttgttaattttgtaggtcagcatcttttaaaaagtcatttaaaatttgtccttaaacttctttgctatgttgtcttctccctccctgtgtttcagttgaagggatactgccagtgcccactcagcgtgggtcagctctgatttggccagagaggttttgcttctgttccttttcttatatcccctttcctctggggtcaggggagctgactctggattatctccagcttccctctgaccaataaaaccacaaagccaactagtgttcagactttatttttccctctgttatatccttacccacgtttcagtgcagcaatgatatttagtattgttctttgtagtcgtgagccagaagattttgcgtgaatactgaggctgaactattcaagtcaggaaacaaactgtgatactagtttgttcactgttagaggtaggattccatgtcagaaaatatcataatttccagtgaccattttaagtttgtattaacggaacagtaaagagttcttactagaatttaataatgccaagttatttgataattttattaaaaataatggtgggacctagaaatagaggaaggggtacttaataccataccatacctgtaaactcttttgtgtgacattctttgtcacacactcagcccagctgccttggactcatttctcactgccccctttctgtggccccccacctccgtgtgcacagcacgcaatatctccatgggtcaaagccgtggctttcatgggataagctgggcaccaggcctaagacatgcacttttatctcttaatggtttgtttgtaactatacttccagtatcctgtagttaatacagttaattccccaaaatataagcaaataagaactgcacaaagagctacaaagatgtatagggcatccctgagccatgcccagtaatttaaaaatgttacaacatggcatcacagagtgcaggaatagccctcatcaggcagtgttggttctggtccaaacttggccagggctgaagacctatgtgggttacttcatctgcgctgcagtttttttactgacaaagggtgactttgttaaaccttgggttatttccactttttttttttttctggtctgtacttttctgcagcttatatatattttttttattttattttattattattatactttaagttttaggatacatgtgcacaatgtgcaggttagttacatatgtatacatgtgccatgctggtgtgctgcacccattaactcgtcatttagcattaggtatatctcctaaagctatccctcctatttccactttttaaatttggtattgctgttttcccctgccttgtctgttattcccatgtgaaagtctctctcagagtgctttttactttgtgtcttttaacttttgtgtcttttgtgtctgacactggtgagccttcccagcactggtgctccctggtcttctgcacacctttcaggagaggcacttcacggtaatggtcgctctgtgtttttgttactacattacctattttaatccttaagctaatttctcttctcctttttcttctcttccctacccatttgttgaaatgccatgggaagatggcagcaagacacaaacacctccttgtatctaggggttatgaatttgccatgctccatttggacatgccttattctggctcatcataggttttgcctgtttccacccaacttaggatgaattagaagttgttcattagaatgtcctttatcgatagtcattatggcaggggccggattgatgttggagtttaagaatcaaggataaagtgacagtggggacgcgctggactctgtcagttcattagtaagcatattttcaactctctgtgctacagagattcagtgtgttggcctcatggtagagaggccggatgcccacgtgctcctggcattccacaggatggtttaaaggtgggtttaggaagattatagtgaccacccataattagtaacttgctattttaacattggattcttgcagtttttcccaacacatttgtttctcagttgatgccacatttataaaaatagaaatacttaaatatctaattctgtactttgtcattagccatatgaccttttaaaagttgttttcagtgtgattactggacaccattttaatcctattttctgagccaaaattatcatctatagttgtatgaaataaggtgttttaaatgaagaagttttcaagaaagaagaactcgtattctcgatactcagagtggaaggcatggctggtcatcagtgtcagtgtgtgtgttgggcggtcctgtatgtatcgcattgtcccatctcagctcaggctgccatcacaaaatcccacagactgtgacgtaaagagcagacagttctttctcacagtgctggaggctggtagccagggtgcagcatggtggagtcctggtgagagcccttttactggttttaggcagtcgccttcttgctgtgtgctcacagagcctttcccgtgtgtgtgcatggaaagaacaagtcctccagtctcttacaaggagactaagcctgtcagatcaggctacccttatgacctcatttaacctcaattacttccttggagcccccatctccaaatacaaccagactgaaggttaggacttcaacataggaattttgaggggacaccaacattcaatctgtaacacacccctgttgtttggcttaacttcgcttagggatctgttgcttttctagagcctttgtatgctttattctcacgtggaatttcttttaaaattggacatttcattgcccactcaccttccgaacaagctattcctacggaatgagtcacagcgacatgcctagtgggaggtggggtcactgtgacactgtgaccctggaggcggaggtgctcagctaggctttgactgctctcgtcactggggattgtgaaaactttttgatcgcctggtcagtcttgtctacttttttgtttttgggttttttttaagagttgggtttcagatttctgtttcatgcttagaataattgtggcttttggagaagaatattttaaactggtgaaaaggcaaaaaatgtggaatcaagaagtgaaagcacaattgtttacagtttagtaagcagttgtggtaaagaaatgtgtctattcatcattgccagatgacttaaaattttatgggggagcataaattttaaacaaaaatgaattgtgctcttcataggataaatgtgtgaatttctccagaatttgtttttttagatattataatcaggatctcctgcttacagctttatgaattttatcctgaagttatctgtgaaatgaatcgatggcatcttataagatttactcagaattaaaattttgatttaccaatcattaataacacaatcaatactttaacaggtatttacttactgaatacttatgggagcatatcagtgctatgtgtttgagaatcactggtaaaattaggtgtagttgtaacttctcaaaagaaaaaacaatataaacaagtaaatacaattaagtttttagtgcatgttaatgaaaaaatggtacaatacagtgaatagataaaacgtcatttggatttgattttggaatgttttatttgtttttctctttggagcatcatttgagtcatagtttaatttgtattctctgggtacacgcaaagtgcagttgagatgaaggggagatgggtcaggagcatcatggttagcagtgaaatcaagactggaaacagagtcccccacatgctttacatcagtttgtattaggagtcattcatttcttacatatttattggtactgatccaggtgcaacacagagttcatggtttaatagatgaaattgtttactttttaaaatcagaggtataaacaagaagtacagtgataacataaagagaaatgataaactgcagagtggaaaggagagtcatgcccagggagaaactcaccagggagacagtgatggaactgtcttaatgcacaattgcttatttttcaccttgtcatagaaataattttaaattgcttgaaggaagctacgggatttgaggctagagcagtaagaagtaacaggtaacaaaggactttccatacaatgggaagtagtttggatttaatccagtcagggtggctatcattacatctacatttaagaataccattcaggtgggccttatgaagagtaggttggaagaatcaggtactagactggggaggtcagttagtgccagactattgtagtaactaagaggcatctcagtcttaatgtattaaaaatttatgtcttgataccagtattctcatactacctgcacctcccagaaaagaaatatttgtctagaaatctttactgtctcagtaaatgttaattctgttcttattcttgctcaggccaaacccactggagtcattcttgtactctgtctcatattcactcctagtccattaacaagttctattggctctaccttcaaagaatatctagaatctgagcatttcttacctctcctgtcactccctagatcccagacaccatcatccatcctggattgctgcagaccctcctaactagcttccctacttaatcccttgtcctcttcagtctggtctcaacacggctcatcatttgacttccctgctggcttcccatcacacccagaggaaacaccctggttcacacatctgaagatagaagacctgtttcttccctgcttcatcattctgaactgattcgatcttctttttccctgcccaggctccagccgaccacatttagtcctaggcagaacatgaatgggctgttctctaaaaagctgtagtgaacttttggggaaagctaagactactaatgggtatgctggggccgccagaatgatagtcctttttcttttggcatttggaaggcctaaatgatcgtaagaattattacagtcaaatcatttgacctaagtctgagatattctcatttaaatgcaatcctaagaccctggtcagatattgaattttgtttatataattgtgctaatgtaaatttgttgattatttgttaactcttggagtcagactatggctggagcatggagatttggcataggttatagggtatactgtgaacattaaccttgacaatgaaagtggaattatgtttaattaaaattgtgtagcatgttggggaggaaaaacgtagagcagggtatacacccttcttcattttacaatgctaggagccccaaaatgctatgagaagtcagtaaaatagggcatagagttcgttaaagatactaaacttcacaagtaactaacagaaacaccccaaataaaaccattgtagtaatggatacatgtattatttttgggggaaagctataaaatactatttcaaaaatagtaaaatgtacactgaatatatagcatggtagtttggagtgagtgcagcaagatgaattattatcatcacagctggtggtaaccagtgttagagtgtttattaaagacagaggtcctgtccacatgggaagcagatggactttaaaaccccctgatgtccattcctgacccctgctgcttgctcatgattctctgtgtgtgtatgtgtgtgtgtctgcacactcacatgcatgctgggtgagagagagagggaaaaggaacggtggacacttgatgaattgacctgaagaagacaaaagtaccaatttcagggaatactagaacatatgttttagagcaagataactgggcaggctagccttttgggatatctctgaagataaagagagacagagcgataatgtaggaggaaaattccaaattaccatggggtcagtgtttggaaaatggacaacttaacattagtggcaacaattatgttatgaaaagtatttctgttagaaagacttacagatgttcctgccctctattggagaataatttcagtatctctcccctcatactaacttgcttcacggagaataatttcagtatctctcccctcatactaacttgcttcacggagaatagtttcagtatctctcccctcatactaacttgcttcactttgtcctttcttgtatagttatttgttatactcatatattaattcaatataacctacttaggaagacttgagttgacgtgagtataattggaccctgactacctgtatatttcaacaacaacaaaaaaggcatttaactcagtagtcacagacatattttgttattctatcatttgctcaatttattgttttgtgtttctttttttcattttttttcttttttttgagagacagggtctcactctgtgagtcaggtacttgactagggaggccagttagtgcagtgttgtgatcatagctgactataacctcaaattcctgggctcaagataacctcctgcctcagcctctcaagtagctgaaactacagtatactccactgtgcctgactcatttttatatttttatttttgtaaagctggggggtctcactgtgctgctcaggctggtcttgaactcctggcctcgagctcctggcctcaagctgtcctcccgccctggcttcccaaagtgccggggttacaggtgtgagccaccatgctcagtcatttgctcagatctgtgtgtgtgtgtgtgtgtgtgtgtgtggcctcttggttgtttaaaacaaaagacttttcaaagagcagttagctgattaaataacgaattcatgcagttattcagcaaatgttgttattcttgaagttgaatactgtccatttttaactaagaattatgtttcatctgctaggcatatgcatggatagaaattactagatctcttggtgtatcttcttcattgaatctttctgttcctgtttcttaatcgtttaacatctttgctattgtatattagtatttgtggtctccatttgatctttgtggcactttctctttgatgattagcacttgacaagttatcttctttttcagtgcaagttctgttgaaaccctcactgtgtccagccacagcaataggcctcagagtccgtttctcaacctgaaacattgtctgtctgtgcattttaaacaagccctatgtcttagcataatgaagtaggggggaaacaccccatcactcacaatttcctattcttaactggcatttatctgagagacattttggtccttggcttgtaaggatatttgattactgggattagacctgccagtcatcctctctgttcttgagaaagtcacatgagcagctagctttatttttcagttttctcatctgccacaaagggagattaatatgttccttacctatttcgtagggttgttgtgaatcgagtatgagaatggccttgaaaatgccttgaagagctgatggcagtgacagtggctgccatccttgcatggccaggcacttcgtggtacatttgctgtgtttgcacctgtgattgtagtgctcttggggtagccgctactgtgtccatttaaaacggaggacactcttacaagagagttaaagtatttggggattttcaagggaaggaatagttgcttctggctgggattcagaaaacacttcctggacaaggtgatattttggctgtcttgtagcagttatggaaaatgttgcctggtagcactaaaatggccttttatgtactagtcatctaattgcaaaacattgtcctttgtttgtaaaatgagtatatcccctgcttggattaaaagcttgcttctgccaggcatggtggctcacacctgtaatcccagcactttgagaggctgaggcaggaagatcacttgagcccaggacttcaagaccagcctgggcaataaagtgagaccctgtctctacaaaaaaataagaaaattagctggatgttatggtggtgcgagcctgtcatcccagctacttgagaggctgaggtgggaggatcccttgagcccaggttatcgaggctgcagtaagccaaggtcataccattgtactcccgcctgggcgacagagcaagaccctgtctctaaaaataaaataaaagcttgcctcaagcacatttttggtataagtcgtcccttgcttttttctctctcagacaaggaggagcttaccctgcttttttttctcctgggaaggaaggccctggaggatgttttgtagaaagagctttagaatgctcagtgtaaagggtagccctgtccctgacctagtgtcacagccatgggagcgccgctcagtattgcttccaaggcctatttagtcaccacatgagctgctgtgtgcagcactgcagtgatagccaacatcataaaatgttattttacaagttatttggtgctatagatcttgatcaaaattcatagttactggaatactgtcaagatttatcatagaaatcttttttttttatactttaagttttagggtacatgtgcacattgtgcaggttagttacatatgtatacatgtgccatgctggtgcgctgcacccgctaactcgtcatctagcattaggtatatttcccaatgctatccctccccctccccccaccccaccacagtccccagagtgtgatattccccttcctgtgtccatgtgatctcatcgttcaattcccacctgtgagtgagaatatgtggtgtttggttttttgttcttgcgatagtttactgagaatgatgctttccaatttcatccatgtccctacaaaggacatgaactcatcattttttatggctgcatagtattccatggtgtatatgtgccacattttcttaatccagtctatcattgttggacatttgggttggttccaagtctttgctattgtgaataatgccgcaataaaaaacaaccccatcaaaaagtgggcaaaggacatgaacagacacttctcaaaagaagacatttatgcagccaaaaaacacatgaaaaaatgctcatcatcactggccatcagagaaatgcaaatcaaaaccacaatgagataccatctcacaccagttagaatggcagtcattaaaaagtcaggaaacaacaggtgctggagaggatgtggagaaataggaacacttttacactgttggtgggactgtaaactagttcaaccattgtggaagtcagtgtggtgattcctcagggatctagaactagaaataccatttgacccagccatcccattactggatgtatacccaaagaactctaaatcatgctgctataaagtaatctttgaagaaactgtagtcaggcagtatgatgcatcttaggtacataagtatttcttctgtaatactatttatgtatttctgtaatagcctgcatttataaaatctgtcagggtctatggggacttgagctgcccaagacaagaattagtttctgaagagagcttgtgctgcttgggcaggcagctgagcatggctgggggctgccacagtgcgcagaaccaagagcctgtgctcagctggcacacttgaacttgagcagacccctgggtgcttgagagcagaagtggccatggagccctgacagctgctgctgtcagtgggagacaggggaggtttcaggcctgtgcattgctgggaatgagccctgagttgagtataggtacaagttttaaaaattcttaaattatgtctcaaaatgctcctgtggccgctgtagctcctcaatctagggcttttccctttgcttctgaagactctaattctgtacacactgctctggctgccctgctgaggaaaaaaagctttgtggactgaagtgacttccacattatcctgatttcttttccagtttaccaattgaagatgagctacttttcattaacaaaatgcctgttgtggcgaagcatctgtgtgttcacttcttagtgcctttctttacaagttggtttcattcctctgttcccttccctagagtgaccagcagaagctcgttatatgctgcttgtacattgtgcttattcatatccttcccccattctgttttcttgccttaagaaatagttgtccaagacagtgcccagaaatagttgccttaagaaatagttgtccaagacagtgcttaggggaggcaaggtggcccagggcccagtatatggacatgtgtcatggacacctacataaaggaagggatgaaaaatttggggttgaatgggaaatgaatgaaaaaaaagtgagagggagaaagaaatagatgattaaaatcttagcaccgtctaaatattaatttttactattcactattaacctagttggctgaagtggtaaagaaactcatattagtgagtatctgttattaacaaggcagtatgttgtacccttcatttttgttgttctcagtttatgtatttttttattttttttaattaaaaagcacagagaataatagaaacacataagcatgctcactgcctagaattagtaacacatgtcaatcctttgtctttttttagtttcccatagttttataatagaaacaatatgacacataaatttgaaaccctctgggttcccctcctgagtcatactcctctttctctctccttagagacagtggctttcatgacttttctgtgaatccttctatttatgtttttatactcatcttgtattcataaactattgtattgatttctgtgttttttaaaattacattataggtgtcatactctgtatatcctgtttatcccctttcatttcttgagacctctccatctgattcttagacgtctacttcacctcattttaagtgccgtacagtgttctgttgtatgaacacaccatggtttacccatctttctgatttatgctgggtgcagttttctactcttataaacaacgctgagatgtgtatccttgtttaggtatattggtgcatctgacagtttctgggtacctacctaagatttctggggtataggctatgcacactatcaacttcagttatctcatttaatctgaacaaatgtttcctggggcaggtggcaggatctccattttacacataagacaatttaacagttgaatgccatggaacttggccaacttaataaggaaaccagcacttgaatccagatcaaattccacccatttcaatctagagctctaatacccagcagtccacataactcttcaactgttagcctttctgatcattggaacagctgcagccagctagtaacatacatgatttcaaagcagagaatcaaaacagataataaagaggagggtccatccttaagaagaatccacagtggccatattctccttgtggtcatcaaaggatttcagacttggagtaaaacgcatgctccttaaaatgacgggtctaaggtttctatttgtacaggactatttcttcatgacagaagactttattttatgctgcttaaaatccatgtattaaatgcaacatgcaggcctattttgattaaagaaaagtgttatagtgagcatcgtagtgtctctgttttactttgcaaaatgtggagaccattttctccaggtgaagagtgctatctgcatgtggatctttttttcatgacactttattcacgcttgaaccatctgtcttttgatttcatttttgctttgttcttttcttcaacttctaggtagaaaatctggtgtattaactgtgaaaattttagagctgcatgaggaatgtgccatgcaagttgccatgtgtgagcagttattggggtcaccagccaccagctcctcccaaagtgtggctcccaggcctggagctggcctgaaagttctcttcaccaaggagactgcaggctacctcaggggccgtccccaggacactgtccggatcttccctccctggtgagtgcgcagaacttaatccagcagtcaccaactgtgagtcagcctcgtaagaaaagacatttttatcagttacatttttgtcactttatcatagagcaatgcgagaggaagagagccaggattggacgtgggttttctgtcagagaagcattggattgtctctgatagctcatttctagttctgtcagcatatttctgataatttggggtgagagggttgaggaaacaaccatattaagactcttgcccaagtgatgtgttataagatctggctgtttttgtttttatatttcttagaaaaataattttgttaacaggcattatgtgacagtaggataacacacattaattaaatatttcttagtcacttgggaggataaaaagcatgaattaagatatactagtgtttgaattgcaggagcaaaaatggtcattattggatcagaaattattttaaaggatactatgtgtgctgtcttttgcagtgggatattgatttttaccatgaatagaagaaaatcatactacttttgaggaaaagtttgagcagccttgttttaagagctaattattaattttttcgtaattttttataagttttcattttgtatgtatgaggaagggctataggataaatttttataaatattattgctggatcagtgcttctttaattttagcagactttgtcaaatggcaccattttacgttcccactggcaatgcctgaagtgcctttttcttctcctttacaaacctactttgttgatctagaccaagttaaaaattggaaatatgatgtttatcattttaattcatatttctcttatataaaatgggcttaggcatttttctacatgtttttaagaaccacttgaatttcattttatgtccattgatagcttttgacctttcttctctttggtcactttggtcctggtgatttctaccatctttttataaatgattaaaaaaaaaagtagtgccttgtcagtcatatacattgcagttagttcgttccccatttaccatttgactttttacgtttttagggggcaggggtttgttttgttgctttgtttttgatgagcagaacttttctgtttttctgtggttgattttagccatcttttatagcttctgggttttgtatcatagatagaaaggttttccttactatgaggtgtaaaagttattctatgttttattctaagactttcatcgatttaaaaatttttacatttaaatcttttgacactcctggaatttatctttatgggtaatatgtgaggtagtgaatgcaattttatttttttccaaatggccacgaggagtcccaacattatttattgaacattctgttttttcttcatacaattttaatgctgcctttatcatgtactaaatacctacatatattttgggctatttactcttttaatgtaactgtatttgcacatgctagtattatactatttcagttactatagttttatatggtgttttaataactgctaggactactcacatctcattaagcttaatttttagaactttcctcctaataattgcttcctttcttttttactttaaatatttgccttaaacatttattttcaagtatgcattgtaaaagttaaaacaattcagaaatatataacttagaaagtgaatcctcttaccctcacctcttcaattaatcacactcattctagatgactgctgttaataatttggagtataatcttccaggatttttaaattcttaaatattcaattatgtatttaacacatcccagtgactatacacaatctatatgtaagttatgtaatcctgcctatttttctataataagtttaggtttaacttactagattaaaaacagattgataggttttttagggtaggttaatctctgcattcacggagtagggctttaaaggtagtgtctggcagggttctgatgtgatgctcccctctccgtgttcatggagtgcacagcagcacaggacttctgtcagcatctcttaccttgaacctgtcttccctccttcagaaatctgtcctcatttggatcttctttgttcaccccttagttttactcccttgtggaatttagctctttcattagtgtctaagttcatttgtggtggcagagtcttttattgttattattttttaaaaaactcctccctcctcagctttttaaattctttttttctttttctattttttgtagagacagagtcttgctatgttgcctaggctggtctcaaacgcctggcctcaagcagtcctcccacattggcctcccaaagttctgggattataggcctgagccaccaggcctgttcccttctcaacttctcatttttttggcacacctttatatgttttaaaatgcatttattaaatgaccttgtttttttaatatctaaatatgattatttttcttcagggaagatgttttagaggctttaaatgtaggacattttcttgggcttatgagaagtaaaattagatcaagattatctacaaagatttatatgaccaagaatttctaaatcccactgactccttagactttacaagtaaatgagttattatcattagactttggaatgtttgtaggtctggatcttaccaaacaatccctgggtgttactctccacaggaatgcctgtgggctgtcaagagattatttgcctatattcagcatataatgcttaagaaaatagaagaggccgggcgcattagttcacgcctataatcccagcagtttaggaggccaaggcaggtgggtcatttgaggtcaggagttcgagaccagcctggccaacatggcgaaaccccatctctactaaaaatacaaaaattagctgggtatgggtggtgcgtgcctgtggtcccagctactcgggaggcaaaggtgaaagaatcgcttgagcccaggaggtgggggttgcagggagccgagattgcaccactgcattccagcctgggcgacagagcaagaccctgtcgccaaaaaaaaaaaaaaaaaaaacacctcatacttaacaaaacaaaaccaaaataattttttaaaggactagtcttttttttttttatggaaacttgagaaataatagtgaatatatttttccttgtggactggctgtccttttcccactagcacccttctgtgttcatttaaactgttttttttttttaacatgggcacagttttttaaaagaatcaatagactttagatactcctgttggtcctgtagtaataaatatgagtttaggtacaatggctgcttaccccgaggagctcagagccctctgtagatattacctggtaaactctcattggattccagtgaggtgtaatgcagctttgcctctggcaatctgaaaataaagatagaagtaaaatgtcttgcctccaattaattgcattatgaaatagtcatagaattatataagtcaccaacttacaaaaaaatgcattaatctatataatttcagacatgtaaaaataaaatagtataatgaatctcatgtcccatagtttcaacatttattaactaatgaataaacagcttttactactcaagcaaactgaaagctttataatgattccaaagaaacatctcaccacttgaacacagatatactagaaaaaacaaatgaaggaatttactttaatgatactggggagagaggaaggtagaaaccatctgcctgattacatcctgccatgaaatctaactccagaatgagggcaggtgagaggttaagtgtgtgagagtgtatccagagacaaccaggacacctctcattcattcagaagtatttattggtatcccctgtgccagatactttgcttctcctcagaatacacatcccagtatgctggaagagcgaagtctgactttccctattgtcatgagtatacccttccatcggtccattcatatcgtcatctttttagtcactacttagtattccactatatggacatgtggtaatttaaacatcctcttatttagaattgttaaggttgctttctatttttagctgttttaaacactgcttgggtgaaatatttatcattatacctcccttctgatttggttcttagactatttctagaagtagaaattattggtcatagaataccagtgggttttgagccttttgatatatgatttccatagtaacctgtaaaggttgaagctgtctcagctgctgccagtttctcatcacaccacactcaacattttttatggctgcacagtgtgatatagtttttaaaacactttccatattctcaggatgtggtacatattggttcttttactatcataaacagctatgtagtagatattgttatatatgtagtttggtatgtacttcagatattgtttcaaagtcgcttttaggaactgttttagtatagtaaagggtatgtgtttcgtttttgctgttgctgctttgactccttgatattgttaagtcatctgtaaacctcatagtagagtctctgcagctggtcacatcgaatatagcccaccttattttactatgcttttttgcttgtatagcactaaacacatgttgcactttttacaaattgaaggtttgtcaaccctgaatccaacaagtctaccagtgccatttttctaacagcatgtgctcacctgtctctatatcacatttgaataattatcccagtatttcagagttttcataattattatctattatggtgatccgtgataagtgatctttgatatcactgttgtaattatttcgagatgccatgaaccgtggccatataggatggcaaacttaattgataaatactgtgtgtgctctaactgctccattgaccggatgttcccccatcttactttctctcctcagacctccctattccatgagacacaacagtattgaaatctggccaattaatcgccctaatatgccctctaagtgttcacatgaaaggaagaattgcacatcttttactttaaaccaaaagctagaaatgattaagcttagtgaggaaagcatgtcaaaaggcaaggtaggctaaaagctaggcctcttgtgccagttaggcttcttgtgccagttagacaagttatgaatgaaaaggaaaagttcttgaaggaaataaaaagtgctattccagtgagcacacaaatattgagaaagcaaagctgccttattgctaatatggagaaagtttgagttgtctggataggagctcaaacaagccatgacattcccttaaaccaagcctaatccagagcgaaaccctaaccttctacaattctttgaagtctgagagaggtgaggaagcttcagaagaaaaatttgaagctagcagaagttgattcatgagatttaagaaactcccccataacataaaattacaagatgaagtagcaagtgctgacagagaaactgcagcaaattatccagaagatatagctaagatcattaatgaaggtggctacactaaacaacagattttcagtgtaggtgaaacagccttatatttgaagaagatatcacctaggactttcatagctggcgaggaaaagtcaatgcctggcttcaaagcttccaaggacaggctgactcttttattaaggtctaatacagctggtgactttaaattgaatccagtgttcatttaccattttgaaaattctagggtctttaagaattatgctaaatctactcgcttgtgctctataaatggaacaataaaacctggataacagcacatctgtttacagaatggcttagtgaatactttaagccaaacttttgagacctactactgagaaaaaaaattttcttttaaaatactacccctcattgacaatgcacctagtcagccaagagctctagatgtacaaggagatgaacgttgttttcatgactgctaacacaacatccattctgtaacctgtggatcaaggggtaattttgacttttcaagtcttgcttttaactgccatagataatgattccttttttttttttttttttaaatgagatggagtctcagtctgttgcccaggctggagtgcagtggtgcaatctcagcttactgcaacctccgcctcccaggttcaagtgattctcctgcctcagcctcctgagtagctgggattacaggtgtgcgccaccacgcctggctaatttttgtatttttagtagagacagggtttcaccatattggtcaggctggtctggaactcgtgacctcgtgatccacccacttcggcttcccaaagtgctgggattacaggtgtgaactaccatgtccagccacctttcaagggtctgggcaaagtaaactgaaaaccttcctgaaaggactcaccattctacctcccattaagaacattcatgattcatgggaggaggtcaaaatatcaacattatcaggagtatggaaagagttgattccaaccctcttcagtgacttcaggggtttaaaacttcagtggaggaaataactgcacatgcggtggaaaaagcaagagaactcaaattagaagtaaagcctgaagatgggactgaattgctaaaatctcctaactttaatggatgaggagttggttcttatgaatgagcaaagaaactgtttttctgttttgttttgttttgtttttttgagacagagtcttgctctgtcagccaggctgaagcgcagtggcacagtctcggctcactgcaacctccgcctcccgggctcaagcatttcttctgcctcagcctccctagtagctgggattacaggcgtgtgccaccacacgcggctaatttttgtatttttagtagagatggggtttcaccatgttggccaggctggtgtcgaactcctgacctcaggtaatccgcctgcctcagactcccaaagtgctgggactacaggcgtgagccaccgcgcctggccagaaacgggtttctttagatggaatataatcctggtgaagatgctgtgaacattgttgagaggacaacaaagaatttagagtattccataaacttgattgataaagcagcatcaggtttgagaggatttactgcaattctgaaagaagttccagtaatgccatcaaacagtatctcatgctacagagaaatctttctagaaaggaagagtcagttgatgcagcaaactttattgttctctaagaaattgccacagccactccagccttcacacaccaccaccccaatcagtcagtagcaatcaccatcaaggcaagaccctctctcagcaaaaagattatgacttactgaaggctgcattttttaccaataaagtgtttttgactaaggtatgcactttttttagatacaatgctgttgcacaccttataggctataatatagtgtaaacataacttttatatgcaatgggaaacaaaaattcatgtgacttgctttattgtgataataactttattggagtggtctgcagctatacttccagtatctccaagatatgactgtactttttcttgtatttatttactggtgacagcttttctttttatagttatatcacttagaataataattttgttatttccttcccaatactcatgcttctttatctgcttaatgtcttattgctttggctaaaacattcaattcaaaaatttttttactactgtattcccgttgcctagaataatgcttgaaacatagtaggcactcagtaactatatgattaatattgtattaaatcatcatgaagatgttgtcagccttgtttatcctccctaattgaatgagactttgttgatttgtacattcatttaaaaagatttactgaatgtttacttacttactctttaataagccttgtactagaattcctgggaatacaacattcaacatgaatgtcaaattgtttctgcccttaaggagctcacagtgtggtggaagagaaaagtaatataaacaagttataaaagaccactgtaggcgtagtaatagatatctgtacagaggttgcaagaggattgaggaggtaagcacagccagtaggtaggtcagtagggtgggtggttatgtatgtgagagtatgtgtgtgtacctgtgtttatgtgtgtgtgtgtgcttggggagactacagaccgagagatagggtgtcaggggtagcttcctgaagttggtgatgccctatctgagctaaaagggctatgttagaaagaagcaggggagggactatgagggcatttggagtagaggagaccacatgagtaaagaccaaaaagtcagaatggcctagtgtaagacgtatgcaggggtatatgtagtgctttgtgtacgaagtagaaattccaaggcagtagcagcagaaagtgaatctggagaacctccctgtgtgcagtgttaacaagctgagatttacaggagagacattatgatctgattcaccctttaaagtctgtggaggatgactgggggtggaagggcagaataaatgcatctcggaggctgtgggagtagctcaagtgtggaaaaaggtggtgctttggactatgatggtgaatagtggatttggaatatattttggagttagaggcaacagggtttgctgatgggtttgatgtggtatttaagtaaagataggaaacaaggaagacaactaagtctttggcttgagcaaacaagtgaatgatcatgccatgtactgaaatgggagacttgggattgatttgtggggcccagtcaatggtagttttttggtgtcagcagtaattagagcctagagtaaaaacacaagagaggttatgattccaaaagagaaactctgtcagctcgtctgggtttttagtataacccatgtgtggtaattggtagaggacagaggtggagcccatgggcctattcacaactgctttggttcctgttttatatttgccacatgagattctttgaaataaataaattgctggctcctattgaagagaccaaagcagtactaacgatgaaaactttgtttactgggtgagattatcttctgttgggacaacaaggaatttagtcttttccgtcaaaattacagggtgtcttgagaggaaataactaggaaagaaaattaatgcagtatgaaaagggaaaagatatagactatgaggataatctggataatctgaaaaactggaaggaagataaggaaggcagtcatttattctacatgaggaggaagtgaagttagatgacgcttttcaatggggtgtatcttagtctgttttgtgatgctataacagaaaacctgagactgcataatttataagcaatagaaatttgtcagcccagtgcagtgaattatgtctataatgccaacactttgggaggccgaggcaggcagtggattgcttgagtccaggagttcgtgagcagcctgggcaaaccccatctctacaaaaaatacaaaaattagccaggcacgatggtgcatgcatgtagtcccagctccttgggaggctgaggtgggagaatcacctgagcccaaggaggtcaaggctgcattgagccatgatcccactactgcacttcagcctgggtaacagagtaagactctgtctcaaaaaaagaaaaaaattcatttgtcttatggttctagaagctgggaagtccaagagcatagcaccactatttgttgagggccttcgtttttcatcttcccatggcagaaggtgaaagggcaagagagcacaaaagcaagagggagccaaacttgcttttataacaaggccattcttgtgatagctagcccactcctatggtaatgacataaatccattcaggaaggtagcaccctcataatttattaggtcccacctcccaatactgctgcattggaaattaggtttccaatgcatgaacttcaggaaacacattcagactatagcagggtgttcatagaaatatgattaaagtgttttgtgctcaaataagtttggaaaaggctcctcaaatgtgtaccagttgttgtattgtaggactgctcagagtctctcatatgcaaatgtatattgttgtttccagtagagggaagcagaaatggcaacatttgaacaaaatattagcaaacaaattaccatgctcttcctaatctaagatactgagtaaagagagcaactgagaagagtgatgtcatgaaaatggtgtagagtaggaagttccagaaatccatccctctatcgaaataactaccaacctggaaggaaccacatgaagtgcctgttgtggaattctacagtccagttgaacacttacagcaaatattaaagtataatttggaaaaatcacagatggacaattccagtcttcagcaggtaagattctgcgatccctgaggagtgggataattagattcccagagtttttataaagtactactcaaatgtccaattctcaacaaaaaattacaaaacacacaaacaggaaaatatggcccaatacaggaaaaacataattttacatagccatccttgaggaaattgagatattggaattattagtcaaaaatgtgaaatcagttgtcttaaatatgttcaaggagttaaagggaacccatagataaataactaagggaaatcaggaaaatggtatcaaaacaaaatgaaaatatcagtaaagatactgaaattatttaaaaaccaaagagaaattctggagctgaaagtacaataatttaaatttcaaaaacacactagagattgggtgtggtgacttaacgcctgtaatcccagcaatttgggaggctgaggtgagtggattgcttgagtccaggagttcaagaccagcctgcgcaccatgaagaaaccccatctctataaaaaatgcaaaaattacctggatatggtggtgcactcctgcagtccagctacttgggaggctgaggcacaagaatggtttgaacctgggaggcgcaggttgcagtgagttgagatcacaccactgcactccagcctaggcgacattgtgaaaccctgccaaaacacacacacacacacacacacacacactagaaagattccacagaagatttgaggaggcagaacacaggctcattgaacttgaagaaaagaaaattgaactccttctgtctgagaagcagaatgaaaaaaatgaacagagcccgaagcacctgtgggacactatcaaatgtagaaccctgtgtattataggagtaccagaaggagaagagaagagagggaggaaacaccagaaaaaatatttgaagaataatggctgaggaacaatgtctgccagcttttgtgccagcccctcagtgatcaagcgcagcaattagcaatcaaaacacataatcagccctggtcccagcaatctgaaccaggattgtggagctagggaatgtggcatggtaattgctaccacttgaaaggctaatttgaaattcttgaagaataacataactcctcaaatttgatgaaaatctttaatgtacatacccaagaaggccaatgtacttcaagcataataaagtcaaagaggtccacaccaaggcacatagtagtgaagttgatgaaacccaaagacaaagatggtgtattgaaagcagcaagagagaggcaacttgctacgtataagggatcctcaataatattaacagcttatttcttatcagaaactgtgaggtccaaaatcgatcaatcaatgagaaaacgaaacaagcaaaaaaaagaaactatgggggccagaaagcactgggatgatgtatttaaagacctgaaagaatcttccctaactcattttatgaggccagcatcatcctgataccaaagcctggcagagacacaacaaaaaaagacaattttagaccaatatccctgatgaacatcaatgcagaaatcctgaatcaaatactggcaaaccgaatccagcagcacatcaaaaagcttatccaccatgatcaagtgggcttcatccctgggatgcaaggctggttcaacatatgcaaatcaataaacgtaatccagcatataaacagaaccaaagacaaaaaccacatcattatctcaatagatgcagaaaaggcctttgacaaaattcaacaaccttcatgctaaaaactctcaataaattaggtattgatgggacgtatctcaaaataataagagctatttatgacagacccacagccaatatcatactgaatgggcagaaactggaagcattccctttgaaaactggcacaagacagggatgccctctctcaccactcctattcaacatagtgttggaagttctggccagggtagtcaggcaggagaaagaaataaagggtattcaattaggaaaagaggaagtcaaattgtccctgtttgtagatgacatgaatatatagttagagggccccatcatcgcagcccaagatctcctcaagctgataagcagcttcagcaaagtctcaggatacaaaatcaatgtacaaaaatcacaagcattcttatacaccaataacagacaaacagagagccaaatcatgagtgaactcccactcacagttgcttcaaagagaatgaaatacctgggaatccaacttagaagggatgtgaaggacctcttcaaggagaactacaaaccactgctcaatgaaataaaagaggatacagacaaatggaggaacaaacattccatgctcatggataggaagaatcagtgttgtgaaaatggccatactgcccagggtaatttatggatttaatgccaccctcatcgagctatgaatgactttcttcacagagttggagagggctgctttgcagttcatatggaaccagaggggagcccgcattgccaagagaattttaagccaaaagagcaaagctggaggcatcacgctgcctgacttcaaactatactacaaggctacagtaacaaaaacaccatggtactggtaccaaaacagagatacagaccaatggaacagaacagagccctcagaaataataccacacatctacaaccatctgatctttgacaaaaacaagaaatggggaaaggattccctatttaataaatggtgctggaaaaactggctagccatatgtagaaagctgaaactggatcccttccttacaccttatacaaaaataaattcaagatggattaaagccttaaatgttagatctaaaagcataaaaaccctagaagaaaacctaggtttcttgtaagaaaaaaacagacagccccatcaaaaactgggcaaagggtatgaacagacacttctcaaaggaagacatttatgcagccaacagacacatgaaaaaatgctcattatcactagctatcagagaaatgcaaatcaaaaccacagtgagataccatcttacaccagttagaatggtgatcattaaaaagtcaggaaacaacaggtgctggaggatgtggagaaataggaacacttttacagcattggtgggactgtaaactggttcaaccattgtggaagacagtgcagcaattcctcaaggatctagaactagaattaccatttgacccagccatcccattactgggtatatacccaaaggattataaatcatgctgctataaagacacatgcgcatgtacgtttactgtggcactattcacaatagcaaagacttggaaccaacccaaatgtccatcaataatatactggattaagaaaatgtggcacatacacaccatggaataccatgcagccataaaataggatgagttcatgtcctttgtagggatatgaatgaagctggaagccatcattctcagcaaactatcacagggacaaaaaaccaaacaccgcatgttctcactcttaggtgggaagtggaaaatgagaacacttggacacaggaagggaaacatcacacaccagggcctgtggtggggtgcgggggtggggaagcggggaagggataggattaggagatatacctaatgtaaacagtgagttaatgggttcagcacaccaacatggcacatgtgtacatatgtaacaaacctgcacatggtatacatgtaccctagaacttaaagtataataaaaataaaaataaaagacctgaaagaaactgtcaaccaagattgtatatctgaaaacaatatctttaagaataaaggagatgaagctgggcatggtggcttgcatctatagcctcaatgacttgggagactgagggaggaagattgctggaacccaggaacttgaggctacagtgtgctatgagcatgtgtgtgaacagccactgcattccctccagcccagacaacacatcaaactgctgtctcaaaaaaaaataataataataaataagaataaaggagaaattaacacatttccaaatattataaaaccctaagtagttcattactgatagacaaaaaatgctacagcaagtccttcaggctgaaaggaagaaatactaaacagcaatttgaagccaaaagaaaaaaataaagagtattggtcaaggtagttgcataggtaaatgtaaaagccaatgttactgtgcttttggtattgtttgttatttctctttttcctatataattttatgggcaagtgcatttaataatacttacaaatctatattaggatgcatataacgtataaagatatagtctgtgacaatcagaataaaaagggagggggtagagatgtagaggagcagagtgcttgtagaccattgaaacttagttagtattattcaaaggatgttgttatttaagatattgattgtaatttcccagaaaattattaagaaaataactaatatagagaatgggagaaaagaagcaaattaaaatgaaacacacacacagacacacaaaaaaaacagaaaaatatctagtaatgaagtaattgaaaagcaaaaagtatgtaaggcataagaaaaaagtgtataaggcataaggaaaaagtgaatttcttctctattgataatcatgtaaatgaatgaaatgcagttcttaaaaggtagcaattggtagaaaagataaaacaaaacaagaatccacctataagccatctacaagagaatcaaattaaacataaggatacaaaatggttgatagcgaaagaatgaaaatgctaaaaaagaacaggggtgactatattattatcagacaaaattgacttgttaaatctaaaaaagtttacaagggatgcagaggacattataaattgataaaaggtttaacacagcaaaaacataaaataattttaaatatatacacacttaacaaaggagccccaaaatatatgaagtaaaaatggacagaattgaaaggagaaatagatctacgttaattgttgaagactttaatacccactttcaataatggacagaacaaacatgcaggagagccgtaaggaaataaaggattcaacagctgtataaaccaattagacctaacatgtgtaaaacattccattcaaaaatataatacccattcttgagtgcacgcattacattgtctgggttagaccatatgttaagccacaaaacaaagtgttatgaattgaattttgttcccctgcaatttatatgctacagtcctaactcccattacacctcaggctatatggagatagagcctttaaagaggtaattaaggttagagtgggtcctaatttaatatgactggtgtgcttataacaaggagatgtatgcacctagagaaagtgccatgtggggacacagtgagagagacaagccaaggagagaggcctcagaataaaccaggcctacttaacatcttgatcttgtacctccagcatccagaaatgtgagacaatacattttggctaagtcactcagactgatattttgttacgatagctctagcaaactaatacattttaaaactttcaaattaccgaatatcttttctgttcacaatggaatgaaccctagaaatcactaacagaaggaaactgtaaaattaataaacatgtggaaattaaacaacacagccttatataaccatttggtccaaggttttattttctcttttttaaattaatttatttccataggtttttgggaaacaggtggcatttggttacatgagtaagttctttagtggcaatttgtgagactttggtgcacccatcacccaagcagtatacactgaacccaatttgtagtcttttcctcacccacttcccacccttccccaacccccaaagtccactgtatcattcttacgcctttgcatcctcatagcttagctcccacttatgagtgagaacatacgatgtttgtttttccatacctgagttatttcacttagaataaaaatctccaatcccatctaagttgctgcgaatgacattaattcattcctttttatggctgagtagtattccatggtgtgtatatacaccacagtttctttattgactcgttgattggtgggcatttggactggttccacatttttgcaattgcaaattgtgccactataaacatgcatgtgccagtatttttttcctgtaacaacttcttttcctctgggtcaatacccagtagtgggattgctaggtcaaatggtagttctacttttagttctttaaggaatctccacactgttttccatagtggttgtactcatttacattctcaccagcagtgtattagtgttcccttttcaccgcatccacatcaacatctattattttttgatgttttgattatggccattcttgcaggaagtaaggtggtaccgcattgtggtgttgacttccatttccgtgatcattggtgatgttgagcattttttcatatgttcattggccatttgtatatcttcttttgagaattgtctgttcatatccttaaccccctttttgtttggattgttgctaatttgtttgagttccttgtagattctggatattagtactttgtcagatatatagattgtgaagattttctcccgctctgtgagttgtctgttactttgctgactgttgcttttgccatgcaaaagctctttagtttaattaagttccacctctttgtttttgttgcatttgcttttgggttcttggtcatgaaaactttgtctaagcccatgtctactagggtttttccgatgttatcttctggaaattttacagtttcaggtcttagattgaagtccttgatccatcttgagttgatttttgtataaggtgacagctgaggatccagtttctcattgtcttacatttggcttgccagtttccccagcaccatttgtgctgaatagggtgtcctttccccactttatgtttttgtttactttgtcaaagatcagtggctgtaagtatttgggtttatttctgggttctctattctgttccagtgttctctgtgcctatttttataccagcaccatgctgttttggtggctatggccttatagtctagtttgaaatcaggtaatgtcatgcctccagatttattcttttggcttagtcttgctttggctatgtgggctctttggtaaattttaggattgtgttttctagttctgtgaagaatgatggtggtattttgatgggaattgcattgcatttgtagattgcttttggcagtatggtcattttcacaatattgattctacccatccatgagcatgggatgtgtttacatttgtttgtgtcatctctgacttctttcagcagtgttttttagttttccttgcagaggccttttacctctttggttaagcatattcctaagtattttattttattttattttattttattttattttattttattttattttattttattttattgcagctattataaaaggggttgagttttttatttgattctcagcttggtcattgatgctgtgtagcagagctcctgatttgtgtacattaattttgtatcctaaaactttgctgaattcgtttatccattctaggagcttttcggaggagtctttagggttttctaggtatgcaatcatatcatcagcaaacagtgacagtctgacttcctctttactgatctagatgccttttacttctttctcttgtctgatggctctggctaggacttctagtactatgttgaatagaaatggtgaaagtggacatccttgtcgtattccagttctctgagggaatgctttcaacttttccccattcagtattatgttggctgtgggtttattacattgaggtacatccttgtatgctgattttgctgaggattttaatcaaaaagggatgccagattttgagggatgccagcttttgtgaaatgctttatttaaactgtgtctgttgaggtggtcatgtgatttttgtttttaattctttttatgtggtgtatcacatttattgatttgcatatgttaaattgtccctgcatccctggtatgaaacacacttgatcatggtggattgtctttttgatagttggatgcggttagctagtattttgttaagggtttttgcttctgttttcatcagggttattggtctgtagtttttttgcatgtcttatgtgctttcctggttttgttattagggtgatcctggcttcatagaatgatttagggaggattgcctctttctctatcttgtgtaatagtgtcaataggattggtaccagttctttgaatgtctggtagaattcagctgtgaatctgtctggtcctggaagttttttttcttggtaattcttttattaccgtttcaacctcgctgctttttattggtctgttcagggtttctaattcttcctgatttaagcttcctgtatctttccaggaatttattcagcatcctctaggttttctagttgatgtgcataaaggtgtttatagtagccttagataatcttttgtatttctgtggtgtcagtcttgatatctcccatttcttttctaattgagcttatttggatcttctctctccttttcttggttaatcttgctaatgatctgtcagtttatcttttcaaagaaccagctttttgtttcatttatcgtttgtattttttttgtttcaatttcatttagttctgttttgatcttggttatttcctttcttctgctggtttgggtttggtttgttgttgtttctctagttccttgaggtgtttctctagttccttagattgtctgtttgtactgtttcagactttttgttgtgggcatttaaggctatgaagtttcctcttaccaccacctttgccgtctcccagggcttttgataggttgtgtcactattatctttcagtttgaataattttttaatttccatcttgatttcactgttgacccagtaatcattcaggagcaggttatttaatttccatgtatttgcatggttttgaaggttccttttggagttgatttccatttttattccactgtggtctgaaagagtacttgatataatttcagttttcttaaattgattgtgacttgttttgtggcctatcatatggtctatcttggagaaagttccatacactgatgaatagaatgtatattctgtgtttgttgggtagaatattttgtaaatatgttaagtccatttgttccagggcatagtttaaatccattgtttgtttgttgactttctgtcttgatgacctgtctagtcctatcagtggagtgttgaagtcctccactattatttttgttgctgtctatctcgttacttatgtctagtagtaattgttttataaatttaggagctccagtgttaggtgcatagaatatttaggattgtgatattttcgttttggacaaggccttttatattaggttggtgcaaaagtaattgtggtttttgctatttttttctgtcctttttaactgctgttgctttaaagtttgttttgtctgttataaaaatagctactcctgctcagttttggtgttcatttgcgtgggctgtctttttacacccctttaccttaagtttatctgagtccttatgtgttaggtaagtctcttgaaagcagcagatacttcttatccattctgctattctgtttcttttaagtggagcatttaagccatttacactcaacattagtattgagatgtgaggtactgtttcattcatcatgctatttgttggctgtataccttggtggcttttttaattattatatttttgttttataggtcctgtgagacttatgctttaaagaggttctgctttcatgtgtttccaggatttgtttcaagatttagacctccatttagcagttctcatagtgctggcttggtagtggcgaattctctcagcatttgtttttctgataaagactgtatctttccttcatttatgaagcttagtttcacttgatacaaaattcttggctgataattgttttgtttaaggaggctgaagatagggccccaatcccttctaacttgtagggtgtctgctgagaaatctgctgttaatctgatcagtttttctttttaggttacctggtgcttttgcctcacagctcttaagattcttcattttgacttagataacctgatgacagtatgcctaggcaatgatcttttgtgatgaatttcccagatgttcgttcttgtatttggatgtctagatctctagcaaggccagggaagtttttctcaattatttccccaaatatgttttacaaatgtttagatttttcttcttcctcaggaacaccagttattcttaggtttggtcatttaacagaatcccaaacttcttggaggctttgttctttgttttagatggagtctcgctctgtcaccaggctggagtgcagtggcacaatctcggctcactcccggattcaagcaattctcctgcctcagcctcccaggtatctgggactacaggcacctgccaccaggtccagctaatttttgtatttctagtagagatgggttttcaccatgttgaccaagatggtctcgatctcttgacctcgtgatctgcccaccttcacctcccaaagtgctgggattataggtgtgagccactgcgcccagcctgtttgttttttaattattttttctttctctttgatggattgagttaattcaaaaaccttgtctttgagctctgaggttgtttcttctgcttgttcagttttattgctgagacttcccagaacattttgcatttcactgttttatttcctgaagttgtgatttttttttaatttatgctatttcactgaagatttctcccctcatttcttgtatctttttttttatttccttaaattggactttatctttctctgatgcctccttgattcgcataataattggtattatgaattcttttttaggtaaatcagagatttcttcttggtttggatcccttcctggtgagctggtgtgatttttggggggtgttaaagcaccttgttttgtcatattaccggaattgtttttctggtttcttcttctttgcgtaggctatgtcagagggaagatctggcactcagggctagtgttcagattcttttgtcccacaggatgttcccttgatgtagtactctctgccttttcctagggatgtggcttcctgagagccaagctgtagtgattattatttctcttctggatctagccattcagcagggctgccaagccctcgactagtaccgagggttgtctgcacagagtcctgtaatgtgaaccgtcttgaggtttctctgccaacgataccaacacagtatttagggtgtctcttgggtcctgaaggagcaatctgcttccttcagagggtctgtggattctcttggctttcctggtatattcctgcagtagttctggagccaaagttcatgatgcgagtctctgtgagctgctgtctgtccgggtgagggctgcaatctagtcctgcctcctgtctatcattttccccccaaatctccaagaagaaactattgagatgaatgaaaacgaaaacataatgtactaaaacttacgggatgacatgaaagcattatgaagttggaaatttatggatgtaagtacatatattgaagaagagaaagatattaaatcaataacctatctgtacatgttaaggtactagaaaaaaagaagagcaaactaaatgcaatgctagcagaaggatggaaaaaataaagattagagtggagatgaaagagtacaaacattagagaaaatcagagagcatttctaaagacatcacatctttgcagaagtcagcaaaatagaccaaactttagctagattgaccacgaaaaaactggtcaaattactagaatcaaaactgaagagactattactgattttacagaaatgaaaaggattatatgagaatcctatgaacaactgaacaccaacaaattgggtaacctagatgaaatgtacaattttctacaaaaacagtgtgcaagaactgactcatgaagaaataaaaaatctgaatagacctataactggtaaggatattaaatcggtaataaaaaccttccaatggccgggcgcggtgactcacgcctgtaatcccagcactttgggaggctgaggcaagcggatcatgaggtcaggagatcaagaccatcctggctaacatggtgaaaccccatctctactaaaaaatacaaaaaaaattagctgggcatggtggtgggcgcccgtagtttcagctactcgggaggctgaggcaggagaatgccatgaacctgggaggtggagcttgcagtgagccgagatcacaccactacactccagcctgggtgacagagcaagactccgtctcaaaaaaaaaaaaggaaaagaaaaaaccttccaatgaagaaagactcgctatcagatggattcatgagtaaattctaccaaacatttaaagaagaattaacaccagttgttctcaaattcctcccaaaaattgaagggaaaggaccacttcctaactcattccctgaggctagcattaccctgttaaaaaaaaaatagacaaagattttacaagaaaactggagaccagtatccctgatgaatattgatgaaaaaatcctcaacaacattctagcaaattgtattgagcagcagattaaaagagttataccccatttccaaaagggatttcccagaatacaagaatagttcacaaaaaccaattcatgtaatataccacattaatggagtgaaggagaaaaaccatacaattgttttaattgatgcaggaaaagcatttgacagaatccagcactttgtgataaaaacactcaacaaactgggaacataagattacttcctcagcctaacatacagcagttatgaaaaacccatagctaacataccaaatgatgacaacttagaagctttccctctaaaatcagaaacaaggcaaagatggttgctttcacccttccatttaagatagtattagaagttctgaccaaagcacttaggcaagaaaaagaaaagaatctagattggaaagaaagaaagaaaattatctctattcagagatggcatgaccttatatgtagaaaaccctaaagattatacacacacacacacacacacacacacacacacacacacacagagcacgttagtaaattgaggaaagttgcacaatgcagattaatatacaaaaattagttggatttttatcaatagcagtgcataatctaaaaaatgaatttaagtaaacagtatcgactacaatagtattttttaaaaaccacttaggaaaataagtagatgccagactcttacaataaaaactacaaaacaaatttgggcaagatggccagctagatgcagttaaggtggaacagctgtcaccaaggaaccgggaagacctggtgcattcctaacagatcttcagagggaaggtactgacagtggatggaaggaataaacagaagctgggctgaagggataggaagctgggaacccggcacagggctactgcatactgggactccttcctagcccctggtgactctgggggaatggctgagttgaactgacaagcagcaacctgctctcaccacaagcctctggaatcccaggaggcaaagaacccttttgtcttgtctagtcctgtcctgtcctgtcctgtcctgtcctctcccctcccctcccctcctgtcccatcccatcccgtccttgcctcgcctcaccttgcctcatttttcttttgtttttttctattttgaggaggaatcttgctctgttgctctctctgtcacccaggcaggagtgtcttggcaaagttttgcctcactgcaacctcagcctcccgggttcaagtgattctcctgcctcagcctcccaagtagctgggactagaggcatgcaccaccacacctggctaatttttgtatttttagatgacgtttcaccatgttggccaggctggtcttgaactcctgacctcaggtgatccacctgcctcggcctcccaaagtgctaggattatgggcatgagccaccgggcctgaccactcaacattcttaaagaaagaaattccaaccaagaatgtcatatccagccaaactaagcctcataagtgaaggcaaataggatccttttcagacaagcaaatgctgagggaatttgttactacctgacctgacttacgcaagcttctgaggcaagcactaagtatctaaaggaaagaccattatcagccactaccataagttacttaagtacacagagcagtgacactataaagcaaccagacaagtctacataataaccaactaccatcatgatgacaggatcagatccacacatatcaatacgaaccttgaatggaaataggctaagtgcccaaattaaaaggcacagcgtggcaagctggataaagattcaaggcccaatagacggctgggcacgtggctcaagcctgtaatcccagcactttgggaggtcaaggcgggcagatcatttgagatcaggagtttgagaccagcctggccaacatggtgaaaccccatctctactaaaaatacaaaaaaattagctgggcgtggtgacatatgtctgtaatcccagctactgagggaggctgaggcaggagaatcacttgaacctgggagatggaggttgcgctgagccaggatcacaccactgcactcctgcctgggcaacagagcaagactccatcaaaaaaaatacataacagacccagtagtatgttgtcttcaagagacccatctcacatgcagtgacacccataggctcaaaataaagggatgaaaagaaaaatctaccaagcaaatggaaaacaaaaaggcaggggttgcagtcctcatttcagacaaaatgactaaaccgacgaagatcaaaaaagacaaagaatcacattacataatggtaaagggttcaattcaacaagaagacataactcccctaaatatatatacacccaacacaggagcacctagatccgtaaagcaagttcttggaaaccttcaaagagacttaaactcccacacaatagtagtgggagatttcaacaccccactgacaatattaaacagatcatcaaggcagaaaattaacaaagatgttcaggacctaaactcagcactgggtcagatggacctgataaacatatacagaactctacccaaaagctacagaatatacattcttctcattattacatagcacatactctaagattgaccacataattggacataaaacactcttctgcaaatgcaaaagaagtgaaatcataacagccattctgtcagaccacggcacaatcaaattagaaatcagggctaagaaatttgatcaaaaccgtacaattacatggaaattgagtaatctgctcctgaatgatttctgggtaaataataaaattagagctgaaatcaagaagttctttgaaactagtgagaactaagatacagcataccagaatctctggaacatagctaaggcagtgttaagacggaaatttgtggcactaaacactcacatcaaaaagttagaaagattggctaggtgcagtggctcacgcctgtaatcccagcactttgggaggccaaggcaggcggatcacttgaggtcaggagttcaagaccagcctggtcaacatggtgaaaccccgtctctacgaaaaatacaaaaaaaaaaaagttagattccaatttaacaacctggcatcacaactaaaagaactagaaaaccaaaagcaaaccaactcagaagctagcagaacataagaaataaccaaagtcagagctggactgaaggtaatcaagacatgaaaaacctttcaaaagatctaggagttagttttttttgaaaaaaaaaaaaaatatatatatatatatatagatagatagatagatagatagatagatagatataaaaaatagactgctagctagactaaacagaagaaaagagaagatccaaataaacacaattagaaatcacaaaggtgatatcaccactgaccccacagaaatacaaataaccatcagagaatattatgaacatctctatgcaaacaaactagaaaatgtagagggaatggataaattcctggatgcatgcaccctcccaggattgaactaggaagaaattgaatttttgaacagaccagtaatgagctccaaaatcgagtcagtaataaataccctgccaaccaaaaaaagcccaggaccagacagattcacagctgaattctaccagatgtacaaagaagagctggtatcattcctactgaaactattccgaaaaattgaggaggagggattcaccccatctcattctatgaggccagcatcatgctaatatcaaaacctggcacagacacaacaaaaaagaaaactttaggccaatatttttgataaacatcaatgcaaaaatcctaaacaaaatactgacaaactgagtccgcaacacatcaaaaagcttatccaccacgatcaagttggctttatccctgggatgcaagattggttcaacatatgcaaatcaataaatgtgatccattacataaacagaactaaagacaaaaaccacatgattatctcaatagatgcagaaaacgctcttgataaaattcaaaaccctttcatgttaaaactctgaattacatattgaaggaacatacctcaaaataagaagagccatgtataaaaaacccacagccaacatcatactgaatggacaaaaatgggaagcattccccttgaaaaccagcccaagacaaggatgccctctctcaccactcctattcaacattgtattggaagccctggccaggacagtcaggcaatagaaataaataaaaggcatctaaataggaatagaggaaatcaaattattcctgtttgcagaagacatgatcctctatctagaaaaccccatagtcttgggcccaaaagctccttaagctgataaacagcttcaacaaagtctcaggatgcaaaatcagtgcgcaaaattcactagcatttctatacaccagccatcaagctgagagccaaatcaggaatgcaatcccaatcacacttgccacaaaaagaataaaatacctagtaatagaactgaccaaggaggtgaaagatctctacgagtactacaaaacactgcttaaagaaatcggagatgacacaaataaatggaaaaatattccatgctcattaataggaagaatcaatagcattaacatgaccatactgccaaaagtaatttacagatttcaatactattcctatcaaactaccaatgacatttttcacttaactaataaaaactattttcaaattcacatgtatccaaaaatgagcccaaatagccaaggcagtcctgagcaaaaagaacaaagctggaggtgttatgctacctgacttcaatctatacaacagggctgcagtaacaaagacagtatagtactggtacaaaaacagacacatagaccaatggaacagaataaacaacccaaaaataaggccgcacacctacagtcatctgatccttgacagtgctgacaaaaacaagcaataggaaaaggactccattcaataaatggtgttgggatagctggctagccacatgcagaagattgagccttggaccctttgcttatataaaaataactcaagatggatcaaaaatgtaaaacttaaaactaaaaatgctgcaagacaacccaggcagtaccgctctggacataaaatttaggcaaagatttcattatgaagacaccagcagcaattgcaacaaaaggaaaaattgacatatgggatctaattaaatcaaagagcctctgcacggcaaaagaaactatcaacagagacaactatcgacagcctacagaaagggagaaaaattttgcagactacacatctgacaaaggtctaatatccagcatttataaggaacttaaacatatttacaaggaaaaaacaaaaagcctctttaaaaagtaagcaaatgacatgaacagacacttttcaaaagaagacattcatatggccaacaagcacatgaaaaaaagctgaacatcacttatcattagagaaatgcaaatcagaaccacaatgagataccatctcacaccaattagaatggctattattaaaaagtcaaaaaaataacagctgctggcaaggttgtggagaaaaaggaatgtttgtacactgttggtgggagtataaattccttcaaccattgtggaaaacagtattgccattcctgtggaaaacagcattgccattcctcaaagagctcaaatcagaactctcatttgactcagaaatcccattactgggtatatatacccaaaggaatataaatcattctaccataaagacgcaggcaagcatatgtttgttgcagcattgttgacaatagcaaaaaaatggaatcaacctaaatgcccatcaacggtagactgaacaaagaaaatgtggtgtgtatatactacagaataccatgcagccataaaaaaaaaaatgaggtcgtgattttacagaaacatgaatggagctagagactattatcctaaacaaactaatgtgtgaacaggaaaccaaataccacatgttctcacttataagtgggcactaaattatgagaacacattgacacacagagaggaacaacagacatgggggcctactggagggtgggcggaaggagggagaggatcaggaaaaataactaatgagtactaggcttaatacctgggtgatgaaataatccgtacaacaaatttctattatatgttacctatataacaaacctgtacatgtacccctgaacttaaaaggtaaagaagaaaactacaaaacattgctgaaataaattaaggaagacataaataaatataaggacatcccgtgttcatgaatttcaggctttaatattgttaagatgacaatatcctaccaagcaatctacagattcagtgcaatccctatcaaaattccaacagcatttttgtagaaaatctattcgaatattcatatggactatcagcagacctcaagtagccaaaaaattttgaaaaggaagagcaaatatgtaggactcacaattcctgatttcaaatcttaatataaatctacagcaattaaaacagtagggtactagtataaggagagagatagagatcaatggcatagaatagagggcccacaaataagaactcttacatatatggtgaagtgagttttgtttttcgtttttgtttttgttttttgttttttgagatggaatcttgctctgccgtccagcctggagtgcagcgacacgatctcggctcaccgcaacctccacctcccagatttaagcaattctcctacctcagcctcccaagtagctggaattacaggcgcccaccaccacgcccagctaatttttgtctttttggtagagacagggtttcaccacgttgcccaggctcgaactcctaacctcaggtgatctgcccacctcagcctcccaaactgctggtcagttacgagctaccacgcctgaccatgaagtgagttttgacaagggcactatgatcattcaatatgaagaacagtctttttcaacaaatgggaaaattggaaatccctgtgcaaattaatgacattgagcccttgttttacaccatatacaaaaatcaacttaaaatacattaaaagactaaaactcttttttttttgagacggagtctggctctgtagcccaggctggagtgcagtggcgtgatctcggctcactgcaagctctgcctcctgggttcccgccattctcctgcctcagcctcccaagcagctgggactacaggtgcccgccaccacgcccagctaattttttgtatttttagtagagacggggtttcaccgtgttagccaggatggtctcgatctcctgaccttgtgatccgcccgccttggcctcccaaagtgctgggattacaggcttgagccaccatgcccggccgactgaaactcttaagagccaaaactataaaaccattagatgaaaatataggggaatgtcttgatgacactgcgtttggcagtgatttcttggatatgacaccaaaagcacaggcaacaaaggaaaaaaatagttaagttgaactctatcaaaatttggaagtttcctgcatcaaagaacactgtcaaaagagtgaaaagtcaacccatacagtgtgaaaagattttcaaattgtatatctgctaatggattactatccagaatatatagggaattcctataattcaatgtcaaaaaaaaaaaaaaaaacagcccagttcaaaaatgagcaaaggactataatggacatttatccaaaaaagatatactaattgccaataaacacatgaaaaacactccacatcattagtctttagggtaatgcaaatcaaagccgcaatgaaataccactttttgatcaaagaccactgagaataacaattgttggcaaagatgcaaagaaattggaatgcttttgcacttctgctggaaatataagaaggcacaattactaaggaaaacagttcgggaaatgaaagtgttctggaagtagataatgttgaaggttatataacatcatgtatatacttaatgcctcagaatagtccacttaaaatggtcaaaatgataatatgttttatgacaataaaaatggatataaaaagaagggagcaattaaaagttattattggctacttcttctctggtgtttgtttcagttcataaattagttttctaacccaaattcatacttgtgtagtaaatttacaatttataataaaatatttagtaaaacttagttctcatattaggaatgggtatattgaattaagggcaataattcctttattgtaatgtctgtgagctcacaagtttccaaaattccagttatgccccaactgattaatcattagacttataaatagtataagagtggtgattgcagacttttacattcatgttcactgtatgccggtacattgcccaattcctgaatctcctttaaccttgcagtaaccctcagagtttttctgtatcttccccattttctatacagtctccctgaaagtagtaaatgctgcacaggaaggctgcagtcaaggccttgctgtgttgaacaaagctgtagcttgttgcagacgtccctgtgctagtctgctgctctggggctaacccctccttcacattgtctcctaggagagattgggatgatggctgtcaccctgcaaggtctgatcatgtaactcaagaagtcttggtagagagcttgtgtctgactgacctgaagggtggacactctgttgagaccactgatgaggtggccacagagggagaagtgatgaccagcgttccaggagagtgttctgggttaaggggccagtgggtcacaggagaaattcttcagagaattgtaacataatattttgcaaagtattacaggtgttcaagggtcaagtaaaacactgctgatatcacacatgtagtgtaaactaagtgaagtcatagaggtgagatgtgctattttgtttctgaaagaatgtgagttattgagaggatactgtactttttctatctagagcacagtttatttacttcagagaagctagacatcactgacctcaaaataagtaattttcatgcaacaacccaagtaattacctgtcagagatataagatagttttgatctagctttgaagccctggttaaggactttatagttagagcaataaacttatggttaaatattaaacattattgaatgaatggaatgcttcatatctaatgcagcctctcaatgggtccatttttattctttatcacaaaggtaaagactggaaaagcaaacaatttcactgcttaagaaaatctttcctttctggccgtggtcttctgggggtcgggtgttaaccagcacacccatgagtttactggcctcagtacaacctgcgattgcctggatggtcaggctgtgccagcccctgcactctctccagggctgccgcctggaagaacacaccacttagcacactcatgcttttggacacataacacacccgtcaggttaattatatacatgaacaaaatattttataatttaatacagatttattctagcttacagggtcttggaagcaagcatattctctgtcttctgtgagttcacagcttagaagcataacgtgttatacccacacatgtcccagctagaatgaagaaggttttccttactttttccagcttgttttcttttttcaacataatctataagctaaaggcaaaggattaggatagagatggcctttgacttggcttgttctcaaaatgataggggcttattgtgatcactgagggttcccattgtgtctccccgctttgtgggctctgtgaattcttcctggagtaacctttcccacccctggtctgcctgaaaagctcataattctcctgctgctttcctttgtaccttcactgccatctttttcccaacgctggacatacttggtccctctattgtgcatgacaccatggtgccttccacacgcgtctattttagcacattcaataggatctgtggttgtatttctgccttcttttctacactatgagcttctggagtgcaggcaagtatgatttgtggcttaaatggaaatcttggctttgcaagaccagtgtagccatatagtcttcatgttttctcacaggatctggaaattagatcccaactgatttgtgaggaaccaggaggaggatgggaatttgtatgctagtatttgcagctatgaaaatacatggttcagtgaatcatcctaccccagctaagatacaaatggttggaaagtttttattctcatccacaccttataggccagagggcttacagtaggagaggtaggtggtgttcacccaacaatagtgctttcttgctaaattggtgccaagcagacaaggagaacacgagcaggcatgattgctgggcttccagttgttctcacgtaggcgagttctctttccaacctgtgtgatcatgctatctagaatcccttcagcattccttattgagtgaaaaaaactgaccaaaaggaaaaatatcaaacctgtctgatgaatgattgctaagtggaggtcctgtctttctatatatttgaccgtgaatcctcagcatattgtggagtatagttctcataaaataggtcttttaattctgtgtcgaatacccatgtgtattctgaaaattcagaagtagtattttgaaaatgtcttatttattgtaggcttaataatttttctcaataaatatgctgtctttagctgtttgagagatacaatcttgtgggaataatgcaaagggtataaatgtgggaatgccagtgcctattattctagccccagtcacaacatctcactcccaggagtaattctgagtgttggttctctttctggtgggagtgacgggcagctctttgcctttaggagatctgtgaactggtcaggctgccgtctggcatattttctccttcagacaaatcagtaatgtgaaaatggagttctcaatctcttcccttttcaaagttggcttcagatatttttctgtgtcaacaaaaaagataaaacacctgtttgatttattctgacatctagaatcctaagggttttttaaagaattgatttaagaaatgagaattcagtccaacacagagttaatttattacctgttctcttttgtagaatgtcagtagaatttgttattttcatgttgcagagaagagtacagtttttaactgtaattgatttgctgaaagcagttacatctgtggctaagccataagtaacatttaattctttggcttttaggtcagcttggattttatctattgtcatttttcccagtagtttcaaaaacacaaagttatggaaagccaattctgttatgttgctttaagctcctttagacctctggtgaagcagcttgatgttcctggaagtgtttcatagattttcttcaactactaacatgacagtggacaaataagagagtgtgttgggaaaggaagctttttatttgtaccacttgaaacagcaatattgtcctcacatgcagctcagaagatgaatgtagctgagttcgtatacctgctggtcccttctctcctgggttagccgatctgctaggaagacaggctgttagcacaccctgccctcaattcacatttctcccagggcatgccctgccgggcccagagcatgctcggattggagtgcagtcatgaaagatagcaaagatgtctggtctgttgtctcatacttactttatttttaacttctttcctacctgtcatgtaaagaaacagatactgaggaatagttgtgtgtcagaccattattttgtaattaaaataatccgaagatcatgcagtgatctttaaagccatgcactaacttaaagagtaatttctattacaataaaattgcaagtaaaatatcactttgataatctttaggtaatgggtagccttgtatgtacctaagcatttgaatgtaactcttttctgtgaaagaaaaattataataaaaggctacatgtttcttgccttttatgtcacttggagaatgcagtgctgaggagaggaaataataagtgtattggtactagagccaagaagacacatataaaatgatccaaaaagataagaagtaaatggttaaggtttctttatctaaaccaatacagtatccgccccccgcacccctttttgtaaagccagtcaaatttagcagtggaagagttgtgggaggtttgatacaatattataactggaaaaagaaaagtctatttttttggttattggtttctttttaataaaagacatagcatttaagaaatgtttatagatcatttaagaggaaatacagttgttagatttacctctttgaggtttttcttacagaaattgtttctagccttctgtgatgtgtgaatatcaggcaggaccaatttaagggtagccattgtaacacaaaagttaaagcttttgtgtattcattaagttgggtagccattgtgttacagtgtcgaagtgtgacagtgttcttggagctgtgagtttaggcattgcttgacggatggtctgttgtgtctacgctccaggggactgccatgaaataacagggttcagctactggagggcagagttataagagcactggcattggagtgatggctcttgagtttgtgatcgagattggacaggctccttgattgccacgaattcccttttccacagctgtgacacagcatttacagctacttcattagggtgatgaggagatatgaaaataccatgtgaaagcacccagcatgcggccaataagcagcagcagttcaataaatgatagtccagtttgattgcagttaagttgcaagacacagtcgtgccattgtgagtcacacagttccccgcaggtggccttctgttcctcctgagacacaccttgcccctttctcacctcaccacctccgagactcccttcacccctgcctggaccaccccaacccagtccttctgattcttcaccgaactaagggtgtgtctaagtcaccagttctcatttatttgcttgtttatttttcatcctatcttgtttaaaaattgattttaattggcttagaaaaataccaggattcacagaatgcacaaatctgtatgcaagagaagcagcaggctgcgttaaagtaggagactcggtcaacaccaaggctcagggctctgcccaaaaacagatctgttaacaagaaaaacagcaatatctggtagtgacaccttagaaaaatttccttatgaggaggaagctataatacagaaataaaataatacaggagaacaaatataacctgtttaaatgagaacaatttctgttaatatctgttagtacaagctgccagagtaacagctcagtgaaattgtatattctgtagtatttattggccctcttatcatgggaaagttttaagcatctctgagcatagtttcctaatgagtaaaatggagattaaaaacacttcagggcctatgaaacacttaatgaaacgtggagtctggtaccagagtctgtatatagaagatgcgcaatatattttttttttttgagacagagtctcgctctgttgcccaggttggagtgcagtggtgctatctcagctcactgcaacctctgcctccagggtccaagcagttcttcctcagccccctgagtaactgggattacaggcgcttggcgaccacgcccagctaatttttgtattttgtagagacagagttttgccatgttgcccaggctggtcttgaactcctggcctcaagtgatctgcctgccttggcctcccaaagtgctgagattacaggcgtgagccactgtacctggccaatgctcaattaattttaactattttatcattcatagtaatttgtaatatttcatatagtagaggtaattttagaaatctagtcctggaatattccttaagctatctagaggagagagtaaaagagccaaacttttaagctactgctcaataaatgatggcttcttgcagattgtccctcaataagtattaaagtggcagtgagtttaaagttatactgctggcatactttcatcctttgtttcattcagtgaatatctttagtgtggagtgctgaggatgcagccatttcagggtcttggtagaaatgaccatcctgtaagtagacagttgccacacagggtgcagggggagcctgccagggctcagaggggagcatggggaggcagagccctaggggaggcacccccaggaaagacagctgcgcttagctgggaaggaggaattggaggggctggctgcaggattaggggcagcaaggggcagggtaacttgcccaagtggaacatgtgaaggggaagtggtatggttgaagctagagttgaaggttgaagctagagtgctagcagcacccagggcgtgaagggctgacacttcgtgtgaggaaaagatgcagtatggaaggcacaaggagtaccagaggacacgcatcaggtctgtgttttagaaaacccgacagaaataatgtgaagaatgaattgagggtgggctgggcatccagcctgacgacaaacacacctctgaggaagcaaaaagcagtgagaggaggagcaaccagcggggtggtgacagcgtggtggggaggattaaccagcagcaagaagggacagacttctgagagtgccaaggatgaggattggggttgtgcgtgacagtttcatcttggaagttttaggctgccatgactgggagatggtggcaccttcacagagacagaagaagcaggaaggacagacctcggttatgtttcatttcttggttgagtgcagatgaactaactgctttaaaagtcagctgaggttgcagaaagtgaggagcctaagatcagcatgtgccggaacacagcactggggagcccctgctgcagagccacattcatcctagcaaggacagtttgggttcatatgaacacacagtcactgtggtttaagtcttcaagattcttctccaaaaagtggcagcatttctcagtgttcacagatactcatctctccatcaaaaaggagatcccagtaaaatgctcataaagtgtaattgctgtgagacatcaggtggaccttcctaaattggctatgaagtgtgtaactgaatgctttacctacaattatagctctaaacctgttgaatgtagggaaatattcaccacagaagataactttgatttctgaggaattaattggaagccgtgtttaattagcagaggcacttactcatccaagccgttcttagcttgttgtaataatacatgatttgcttttgagttgtttttttccatttgttctttgttttggttaggaaggtattcatctcatccaaaagtgatataaaatcagtgaaaaaaaaaatttaaagaaagggatgtggggcggggtgcagtggctcacgcctgtaattccaacactgagagactgaggcaggcagatcacttgaggccaggagttcgagatcagcctggccaacatggtaaaaccctgtctctactaaaaatacagaaaattagctggagtggtggtgggcgcctgtaatcccagctactcaggaggctgaagcaggagaattgcttgaacctgggaggcggaggctgcagtgagccgagattgcaccagtgcactccagcctgggcaacagagtgagactctctcaaaaaaaaaaaaaaagaaagaaaggaaagaaaagaaagacatgtggagcacaattctgtcttactttgctggaaagtatcttataagagaaggtttcccctgctctgactcccatagcaggtacaacttctgtctcaaggtcataaacaggctcctgtggtgagcttagcagcacagcccacagcggaattccactccccaagtaaagtggggcagtaggggggaatgcagggagagctgcacctgatcctgtggctgaggttctccttcaggtggtaaagcagccatgagcaggggctggggagtggcctgaagccagcctgctcttttcagaccaggaagggaggggctcagggcaacttgtcagaaaggaatttgctacacattctagtggaaagttcttgtagactaatagaactgtaagtttggggaagtaaggcttatcagttttagaaagcagaatagcttgtgcccaagaactgaacagcagctaggaacactaacagttcaagtccatagtgctgtgagaactacaatagcttcttcagtgtttagcatccagtttctcttagtttgtgcctcatgatgttttgagctttaaatgaatcacagtaaaaagatttgaccaccagccaaaaaaggtgaattcatctcatttgaggctcagggtgaaagaaaaagtaaaataatatcttggagaacttcttcacctattttaccagtattttcctgtttaaagtctacctaatgaagaaaaatgtatccatccactactcatgagagcctgcctaagttcgagaccagcctggccacagttgaatactgtgctgggcactgaagatttagaggtgaatataaagaaaaggcaagatggatttaatgtctaaagtagaagattaggaggaaagcaattaagcagttacctgatttaaaatgttaccctacagtgttcatggaattgtttaaaagctatatcttagatacaaacatgtttgtctcttaatgtgtgggttaagtatttgattagatgagtatgtcctaattgagtaatccaggaggaaaggtcctaaatccctgaaagtaatagcatgtactattttgttaaaatgtaaggtctgtacttgaaactttccagctcttaaaaatgaggaaattccaagcattctgcactaatagatagtgttagtgggtagttggtggatgacgtcaaatgtcagaatggtgaacagcttcgttcatataaactgaaagtgtacaatctgggatcaagtgttctcgctgctctcagggatcggcgcacagcctgtgtgctcccatgtggcctgacttggatttcagagtttatatgaggcacagctgagagtctggaaaaggcacagcatcttctccttcctgtccagatgagccaagtgagcaggaagggtctcagcatctattcctgaggccctatgagaggtttcttcattcctttataatgattaagccctacattgggaatgggtttgatttgtcattgtacaaacttcagaggctttaatggtaattttattaaccttgctggaccttatggaatgttgataaaagcaaccactctttgttatgaaagcaaaaagagacattgaaaagttagttcaagataattggcaaagccagctgccatgatgagattgttgaatagtgatggtggtaatggcagaaaaggtgaaggctctttcttgaaagacagcacaggaatcaccgctctaatgctatctttgtgatgttactgttgaatatatgtgaggtgctgctgtcttctgactgacttcttggtcactatcacagtgttatgactgctataaggtgtaatggtcttttctcgtcattacattctgtttaggttttgtattgtatgagagagatctggggaaagagatatataattggacatttgtatatataatgttaagtgaaaaactgagagttgtaatgcagctctaagttccaagattgatggttggccagatgcgttggctcatgcctgtaattccagcacattgggaggccgaggtgggcagatcacttgaggccaggagttcgagaccagcctggccaacatggagaaactccgtctctactaaaaaaagatagaaaaattagcaaggcagggtggcacatgcctgtaatcccagctactctggagtctgaggcaggagaatcgcctgaacctgggaggctccatcagggcactgcctgttttgcttaccactgtatttctggccacttcagtgtttgtgttcaatgtgtatttaatgactatggacagaatgaatacaaaggaaaaaaaagaacttggaggtaggaaaacaattgtgggagaccagcccatgtgagtgaccaagctgattatatgattgacaaggttgactctacataattgagttttaaaaaagactagaaaggaccacttgaagtcattgaagggaactctctggagatagtggagttcttagtctctgccctttgttcttaaaatattcagctgcattttaggtaaggtagtgatctgccttcaattgcaaatagttgataatatcacttttaatgtagactaaagccaacatttttcatgtattgttctatttggagtaaataacacattttggcatggttcttcatgtcttagcatctgtcagttttcatgtgaggactcagtttacaggttatatacagcacatgttgagcgtggtcagtgggtatttgtacctgaagtacgtacttcccttctgttgctgatattgtcatgagcagttccaccctcagtgtttacctctatgctttgaaatcttctctcaaacgcatattcattcctattttttgtaccctttgggattcctcaatctcatatacatctttccatttctgacctaatcccagcactttgggaggctgagccgagcatagtggggtgtgcctatagtcccagctactcaggaggctgaggtgggaagatcacctgagcccgggagctggaggtttcagtgagctcagatgtgccactgcattccagcctgggctacagagcgaggccctgtctcaaaaaaaaaagtctcatgacttcgtctcctagatgagaccatctctagctgatgcctttgcttgcattctcatgtgcagggccagcagatactgatggagcagatgttctctgaggctgtaggtgctggggcacagatcttttcctcatcctactacctagtgaaggggagaaatgacaagcgaggcaactgcaggtgaaaagtgtttggagagaggtttctatagggctccagtctatgcactgagcccaggcatagacttcagagatgcttcctgaaaagaagttggcaagatatgagggaggagggcgcagctcctgattcctctgacctttctattgtgggtttgatgccccctccccacctgagtcctcatgggcagctgtgttttgtttttttttgttttgttttgttttgtttgagacagagtctcgcactgtcgcccaagctggagtgcagtggtgcgatctcagcagctgtgtttttaagaagtgtttctactcctttccttactcaatcctgaccctgtaaaattcccacttgctggctgccccctccccaaggaaaggccgcccctctgcccctccacagtgggtggtgcccagagtcaggggacaggtctgggctttcctattcttgctgacccagctatagagaccgtgctctttcccattcagagagtcatagctacttggtttttttttgtttgttttgttttgttttgttttgttttgtttgtgtgtgtgtcttttattttacgcttggggttgtctttttaaaactttcttttattcttttatcttgggataattacttattttaaagtaagccttgtttgtttttgtctgttaaaaatctttacagccatccagcttatatcaacttttttatttcctgccaggcaaaaagaattaatagaaaatggcagcccaagaggtaagatacgcagtctgtccacaccccaaacagggcaggataaatgcctttcttggttctaataagccctgaagagatactccctgtagcaccaagtcatttccctctgctgcccctttgaggtgactgtattcccaaaagtagtcagtgtagaggaatggatggcccgtttaggataggtagttgcacagattatctctgagggaggtgactaagaagctgaactccaaagacaagacaaaggaattgatgaacagtatcattctcttaactctgggatagggattctgtgaaggttaatgtatgctcttttttctagggagaagatccctttatatttgattgtcatggggatctgtggcccagagtaaaatcagcagtcccagctgtatagactttcaggttcattatggttgtgatctgaaaaccttggtcacctctgtggtatgtgtcattggattctagctacttgagtgaagtggctcctgtgcattcttagaagcgagtatgagagaggatggggtggagttccagttttactagagaaagctctcaaaagagaattttgatacccaacttgaaacctggaaaattaccaagtacagcttcgtgttaaaaaaaaaaaaatgtcgatgcatctttatcaagttagcaaacgatttctatgattgtctatttccagagtaatttgattgaacgggttctcaggtttccatagctggggttgtaggagtattctccacaagcgaagatagaccaagtgcttgacacgtgacctcaccgaaagaagtcacttaataaagtgcggaatgagtgaagggaagttgcaggtgtaattttcttcaccaaagtcaggaacccaatagaagcaatcatagcaatgaaaatagtaacttttgatgagcgttcacttgtcttttaagggctttatacatatcaaccctttgagagcagatcccactgctcttcgcatctgctgtgaatttgttggtaaagcctaacaaggtgggccatctcacctagggtgggctcagctgtcctgggccaggtcctcctcctgaggtcctggtgaacctcatagtcctgtatgcagcacctccttgaaggtaaatccatcctccagagcagaacatggtggcagaggcacagtgacactggtcccttatcctcctcatgcagtggctcatgctgttaggtttcctgaggctcagttactgcagatgggtgtatttgggggagatggtctcgtagttctgggcatataaaagcaacagtaaaaaccaggcatcaaaaagctgataccagacacaattgtgatcctggattagaaaagaattgttataaaagacatcattgggaccagtagtaatatttgaacatggattgcgtcttggattacagtattgtatcaatgtcacatttcctgaatgtgtttaccacattgtggcgttcaaagggaatggctgtgttcttagaaacagatccagacccggacggcagttccaagacagctgaataggaacagctccagtctacagctcccagcataagcgacacagaagatgggtgatatctgcatttccaactgaggttccgggttcatctcacttgggcttgtcggacactgggtacaggacagtgggtgcagcccaccaagcgtgagctgaagcagggcgaggcatggcctcacccgggaagtgcaaggggtcagggaattccctttcctagccaagggaagctgtgatagacgacgcctggaaaatcgggtcactcccaccctaacacagtggttttccaatggtcttagcaaatggcacaccaggagattatatcccgtgcaaggctcggagggtcccacgcgcacggagcctcgctcattgctaatacagctagtacagtctgagatcaaactgcaaggcggcagcgaggctgggggaggggcgcctgccattgctgaggcttgagtaggtaaacaaagcagccaggaagctcgaactgggtggagcccacgacagctcaaggaggcttgcctgcctctgtaaactccacctctgcgggcagggcatagccaaacaaaaggcagcagaaacctctgcagacttaaatgtccctgtctgacagcttcgagagagcagtggttctcccagcacagagtctgagatctgagaacggacagactgcctcctcaagtgggtccttgacccccgagtagcctaactgggaggcaccccccagtagggggagactgacacctaacacctgacacttcacccctctgagacaaagcttccagaggaacgatcaggcagcagcatttgccgttctgcaatattgtctgttctgcagcctccgctgctgatacccaggcaaacagggtctggagtggacctccagcaaactccaacagacctgcagcagagggtcctgttacaaggaaaactaacaaacagcaaggacatccacaccaaaaccccatctatacatcatcatcatcaaagaccaaaggtagatacagccacaaagatggggaaaaaacagagcagaaaagctgaaaattctacaaatcagagcgcctgtccccctctaaaggaatgcagctcctcgccagcaacggaacaaagctggacagagaatgacgactttgacgagttgagagatgaaggcttcagatgatcaaacttctctgagctaaaggaagaagtttgaacccatcgcaaagcagctaaaaaccttgaaaaaagattagacgaatggctaactagaataaccagtgtagagaagtccttaaatgacctgattgagctgaaaaccacggcacaagaactatgtgacaaatgcacaagcttcagaagcctatttgatcaactgaaagaaaaggtatcagagactggagatcaaatgaatgaaatgaagcaacaaaagaagtttagagaaaaaagagcaaaaagaagcaaacaaagcctccaagaaatatgggactatgtgaaaagaccaaatctacgtctgattggtgtacctgaaagtgacggggagaatggaaccaacctggaaaacactctgcggatattatccaggagaacttccccaacctagtgaggcagaccaacattcaaattcaggaaatagagaacgccacaaagatactcctcgagaagagcaactccaagacacataattgtcacattcaccaaggttgaaatggaggaaaaaatgttaagagcacccagagagaaaggtcgggttacccacaaagggaagcccatcagactaacagcggatctctcggcagacactccgcaagccagaagagagtgggggccgatattcaacattcttaaagaaaagaattttcaacccagaatttcatatccagccaaactacgcttcataagtgaaggagaaataaaatcctttacagacaagcaaatgctgagagattttgtcaccaccaggcctgccctaaaagagctcctgaaggaagcactaaacgcggaaaggaacaactggtagcagccactgcaaaaacatgccaaattgtaaagaccatcaatgctaggaagaaactgcattaactaacgagcaaaataaccagctaacatcataatgacaggatcaaattcacatataacaatattaaccttaaatgtaaatgggctaaatgctccaattaaaagacacagactggcaaattggataaacagtgaagatccatcagtgtgctgtattcaggagacccatctgatgtgcagagacacacataggctcaaaacaaagggatggaggaagatctaccaagcaaatggaaaacaaaacaaaacaaaaagcaggggttgcaatcctagtctctcatgaaacagactttaaaccaacaaagatgaaaagagacaaagttggccattacataatggtgaagggatcaattcaacaagaagagctaactaacctaaatatatatgcacccagtacaggagcacccagactcataaagcaagtccttagagacctacaaagagacttagactcccacacaataataatgggagactttaacaccccactgtcaacattagacagatcaacgagacagaaagttaaaaaggatatccaggaattgaactcagctctgcacctagaggacctaatagacatctacagaactctccacccaaaatcaacagaatatacattcttcccagcaccacttcgtacttactccaaaattgaccacatagttggaagtaaagcactcctcagcaaatgtataagaacagaaattataacaaactgtctctcagaccacagtgcactcaaactagaactcaggattaagaaactcactcaaaaccactcaactacatggaaactgcacaacgtgctcctgaatgactactgggtacataacgaaatgaaggctgaaataaagatgttctttgaaaccaacgagaacaaagacacaacatgccagaatctctgggacacattcaaagcagtgtgtagagggaaatttatcgcactaaatgcccacaagagaaagcaggaaagatctaaaattgacaccctaacatcacaattaaaagaactagataagcaagagcgaacacattcaaaagctagcagaaggcaagaaataactaagatcagagcagaactgaagaagacagagacacaaaaaacccttcaaaaaatcaatgaatccacgagctggttttttgaaaggatcaacaaattgatagaccactagcaagacctaataagaaaagagagaagaatcagatagacacaataaaaaatgataaaggggatatcaccaccggtcccacagaaatgcaaactaccatcagagaatactataaacacctctacgcaaataaactagaaaatctagaagaaatggataaattcctggacacatacacccttccaagactaaaccaggaagaagttgaatgcctgaatagaccaataacaggctctgaaattgaggcaataattaatagcctaccaaccaaagaaagtccatgaccagaaggattcacagctgaattctaccagaggtacaaggaggagctggtaccattccttctgaaactattccaatcaacagaaaaagagggaatcctccttaacttattttatgagaccagtatcatcctgataccaaagcctggcagagacacacaaaaaaagacaattttagaccaatatccctgatgaacattgattcaaaaatcctcagtaaaatactggcaaaccgaatgcagcagcccatcaaaaagcttatccaccatgatcaagtgggcttcatcccggggatgcaaggcaggttcaacatacgcaaatcaataaatgtaatccagcatataaacggaaccaaagacaaaaaccacatgattatcttaatagatgcagaaaagacctttgacaaaattcaacagcccttcatgctaaaaactctcaataaattaggtattgatgggacgtatctcaaaataataagagctatctatgacaaacccacagccaatatcatactgaatgggcaaaaactggaagcattccctttgaaaactcgcacaagacagggatgccctctctcaccactcctattcaacatagtgttggaagttctggccagggcagtcaggcaggagaaagaaataaagggtattcaattaggaaaagaggaagtcaaattgtccctgtttgcagatgacatgattgtatatttagaaaaccccatcgtctcaccccaaaatctccttaagctgataagcaacttcagcaaagtctcaagatacaaaatcaatgtgcaaaaatcacaagcattcttatacaccaataacagacaaacagagagccaaatcatgagtgaactcccattcacagttgcttcaaaaagaataaaatacctgggaatccaacttacaagggatgtgaaggacctcttcaaggagaactacaaaccactgctcaatgaaataaaagaggacacaaacaaatggaagaacattccatcctcgtggataggaagaatcaatattgggaaaatggccatactgcccaaggtaatttatagattcagtgccatccccatcaagctaccaatgactttcttcacagaattggaaaaaaattctttaaagttcctatggaaccaaaaaagagccacattgccaagacaatcttaagccaaaagaacaaagctggaagcatcacactatttgactttaaactatactacaaggctacagtaaccaaaacagcatggtactggtaccaaaacagagatacagaccaatggaacagaacagagccgtcagaaataataccacacatctacaaccatctgatctttggcaaacctgacaaaaacaagcaatggggaaaggattccctatttaataaatggtgctgggaaaactggctagccatatgtagaaagctgaaactggatcccttccttacaccttatacaccaattaattcaagatggattaaagacttaaatgttagacctaaaaccataaaaaccctagaagaaaacctaggcaataccattcaggacataggcatgggcaaggactccatgactaaaacacccaaagcaatggcaacaaaagccaaaattgacaaatggggtctaattaaactaaagagcttctgcacagcaaaagaaactaccatcagagtgaacaggcaacctacagaatgggagaacatttttgcaatctactcatctgaaaaagggctaatatccagaatctacaaagaactcaaacaaatttacaggaaaaaacaaccccatcaaaaagtgggcgaaggatatgaatagacactttgcaggggaagacatttatgcagtcaacagacacatgaaaaattgctcatcatcactggccatcagagaaatgcaaatcaaaaccacaatgagataccatgtcacaccagttagaatggcgatcattaaaaagtcaggaaacaacaggtgctggagaggatgtggagaaacaggaacacttttacagtgttggtgggactaaactggttcaaccattgtggaagacagtgtggcgattcctcaaggatctagaactagaaataccatttgacccagccatcccattactgggtatataccgaaaggattatgaatcatgctgctgtaaagacacatgcacatgtacgtttattgtggcactattcacagtagcaaagacttggaaccaacccaaatgtccaacaatgatagactggattaagaaaatgtggcacatatacaccatggaatactatgtagccataaaaaaggatgagttcatgtcctttgtagggacatgggtgaagctggaaaccatcattctcagcaaactatcgcaaggacaaaaaaccaaacaccacatgttctcactcataggtgagaattggaaaatgagaacacttggacacaggaaggggaacatcacataccagggcctgtgctagggtgcggggagaggggagggatagcattatgagatatacctaatgtaaatgacggtgaatgggtgcagcacaccaatgtggcacatgtatacatatgtaacaaacctgcacgttgtgtacgtgtaccctagaacttaaagtataataataaaataaaatataatcactgaaaaagactttctacacgtgtcaaaaacatttttagccaaaacttgtaactacaaaaagcatgcctcacatttcgtggtacttcaaactttaaaaagacgtattcagaaataaatcaacatgaatacagaagttgttaaaacagtattataatcataaatgggtcgtttaagttttttactgaagcaatagttttcactaaattttacctaaattgaaaaaatagaataaacactgtcagaatatatattgaattaaaaatgactaaatatttttatgtttctgtcagtatatggaatttttcttaaaggcggtcaataaataaaattctgtttatttaaaagaaaaaaagaaacagatccagacctatttagaattaaacggccatgatatctgcagtttattatctgtggttcagcaatataataatatcagtagccacagtgaccacaactatatatatatatatatagttcatgaatctggcatgttttctataagtctgaaagaatttcaaaaaaaaaatgttgaggcagagcagctacctgaggtagccaccaaacctacgtgcagagatcagaagaacacaaatacagtaaacgtgctgagggccaggggcagctgttcagagttgctgttctctgctgtctgctttggtgttccagaagggtgtggccccagtattagcttggcatggtggcgtacacctgtagtcccagctgctccaagaggctgaggcaggaagatagtttgagcccatgagttcaaggctgtagtgaagtatgatcctgcactccactccagcctgggcaacatagtgagaccctgtctcttaaaaaaaagaaaaagaaaaccagccaatattgaaccttttgtttttacagtgatcctatgccgaggtctctaaccacacagcaacctacaatgatgtgagaaggagccaggccccagaaggccaggcagtacaggaggaacgaggtgacgctgtcttatggttaaccatgtgacactacctgtggatagtgcccaggtctctcactccccaacctgaaaagagaagcctgcataactagacccctgtgcatcagattcaccccttccctgtgctacatgtgaaaaagctgggtggacatgatgtgccaagaatggcccaggctgttctctagtagcaaactcccaacctacataccatgtctttagtgcatggtatgactctcccctgatttccatctgccagacacagacgtggcctggactgcacctacacataattttattcttcccaaggtataagaccagtatctggcaagcaggcaggcttctcacaaaggccatttcctctacggaggggttggttttgaaaatcagccaggtctctcatccccaagaaacagataaaccatggtgcattttagccctaatgaattcacttcttgcaccctgctgattgtaaatcagtgattagcatggaataccaaattattagtgacaaatgagtgccttgtcatagacttcctccagaatgactctttggttccttttcttttccattttcactgctgcccttttacctcttctctgaatcattgcaatggcctttagctggttacctgcctacttctgggcccttcttttctcaagccatttttggtcctcctttgtgtgttgtcacagctattatgtaaatttaggaagcatacgtctggccgtattgctcgtctgttcagaaatcttagatggttccttgagatgtatgttagagcccgcttctcagtatacaagttttccttcatgcagcttctccaagtgcattttctgttgttctgccattcattctttggcccaattaatgaactaactcaatattcctggtatttccaccctcattgtgcctggagtatcttgactgttcatttaagacatctcaaattctacttcccaatgaagtctctactgataccttccagctggatgggctttctctagtgtttgagccattggagagagagagagagagagagtgagtgtgtgtgtgtgtgtgtgtgtgtgtgtgtgtgtgtttaaatagaacttcgcagatagcacctgtcatattctgctaatgcaagggttatacataggtttgttctatctttctgctttggagactgctagctccttaagagcagaaacaatgaatatggtatggtgccatacacaggacagatttccagtaatagaatttgttataatttggaatgacattgtggaaaaactcatatattccatataggtttgatgttattatcgttaaacctgctaccaataagaaacccagagttaatgccacaaataccattattattttaatatattaaacaggttttaaaatttattttccagaaaacatttaagaaaggaaattaatgctgtgggactccaaaaataggatgtctttcaagtattgtgctttgttttttaacacttcaggatcaaatatgaaaatgttaaatgtagatttttaaatttttaaagcctacttatttttcagtaacaccctgaaagaagaattgcaaaccctgatggctgctgttgtcctggtgatcagagcagaggtctggagcctgggagaggcccagcagcctggagtggtagcagcagggcttagatgatgagaaaatcttactgttttttctcgttctgtcataggacttgaaaatgttccatctagtgacaattctttaagaatacttttgcatccaggagttgatagattttgaaggttttgggttttttatattattattatagtaagactctggtcccttaggagctggatatttactatctagaatgaataaacgcttcccccatcccaagttaacacaaagctttattttttattaaatagagcatccctttaaaacaattttatgttcccttcaaaaagcataagggggagagcaaattatggaaggtttcattgcctccttccctccctccttccttcttttctccttcccctcacctccccaggctggaatgcagtggcacagttatacctcactgcagcctccaactcctgggcttaagcgatcctcctgcctcagcctcttttgtagctgggactccacccatgtgccaccatgcctggctagtttttaaatttttcatggaaatgggggtgtctatgttgcccaggctggtcttgaactcctgggctcaagtaatcctcctgcctcagcctcctaattagctgggactacaagtgtaagccaccatgcctggcctagaattttttttttttttaaagacagggtctcactctgttgcccaggctggagtacagtggcaccatcacagctcactgcagccttgacctccccaggctcagacaatcctcccacctcatttttgagaaataacatttttcaaatacagtgtcaatgaaaatagaaataaatattagtgtaaataaatattttaaaaattacactgaatgaacggtttgtttatactttcagatttcatattgattgaatttacaggatttataaatcacaatgtagtctctgatttgatcagaaacaatacggcttaggatactagattttacaaggcttttgtgaggatcaaatgagattatatatctgaaagtctttcacaaactgtgaagtacaagtgtttctagtaagtggcatgccactttgtattgcttttactatggctattaggatgtgagattgagaccttcctcctcccctcttgaaagcaagggagacttcccatctctaaggatttctttcactctcactcagcttgccctgctagttcttaggagtgaagtgagatacttcttatttttcaatccatctatgaaaaatttatgcatcttttagtagggtgttcatttgcatgatttatttatgttttcaccccagtgaaggggaagtggtatagggctacaggtgacttttgtaatgttctccattcataagacagggccaccccagtgagtcttttgagttgtaaccaactctatttcagtgacagtatttttgtaaagttactgtttggaaacttatcttgttatcttgtatgtgtattgcatagaccaagaatctgattgaaataacatggcaacaatattgccaccaagaacatgcattttaaccacagcacccttctattgcatagtgcacatgtccaggaattgagctggcttttactaaatgaatattttgttcacttgtatccagatcacttgggactgtgggcacattgggaatttcacctcagtctttgtctccttgtcctctgagatggtacaagtatcatctaaaaggatgtataaaacaggtatatgagagctgctttaccccctcccacccaaaaaaaaaaaaagatataattaacatagtatacaattcttcattttaaaatgtatagttaagtggttttttatatactcacagagttgtacaaccatgagaatgttttcattaccccgaatagaaaccctgtacccattagctactacttttcattccagcttatctatttttttatttttgtcacgtgtccttttggtatcatatctaaggagccattgcctggtccgaggtttcaaatatttgctccaattttttctttcaagactttcatagttttagctcttccttttagatctgtaatctattttgagttaatttttgtgtatgatgtaaaaaggggttcaaaatcattcttttgcctgagaatatccagttctagcaccatttttgaaaatataactttcttcttcttcaattttcttggcactcttgttgaaaatcaattcactgtaagttcaaggatcaattctttcccattgatttatatttctgtccttatgccactattgactttaggtctatgtaccatcccgtcaagtgttttttgatactattgtaaatgaaatttttgtttttaatttcattttcatattgtctgatcatatagaaatacaatttaaatttaagataaatacaattaatttttgtatattgatcttgtatcatataaacttgttaaactcatttattactcataacagtttttttaagattctttattatatacaagattacgtcatctgctaatagggagttttacttcttgcttttcaatcaggatgcctttatttattccccccttgcctcatttccctgactggaacctctagtacaatgtcgaatagaagtgtcagagcagacatctttgtccttttgtggatcttagggggaaagtgttcagggaaagcattcaccattaagtctgatgttagttgtagggcttttgtggatgctgtttgtcagtttgaggaagttgtcttgtatttctgaagttcttgagtgttttcatcatgaacatgtattaaatttagtaaaatgctttttctgtgtctatttagatgattatgtcactttttttctttagtgagatgattctgttacattaattgagtttcaagtggtaaagcaacctatgattcgtggtataaatctcatttagttgtggtatataatccgttttatgtgttgctggatttggtttgctcacattttgtgagagtttttgcatatatactcataagagatatgggtctggaattttcttgtgatgtcttttattttggtgtgagagtaatactattgacctcatagaatgaattccctactctttttttttttttttttgagtttgtaaaagattgttatgaatttctctttaaacatttggtagaattcaccactgaaactatctgggcctatgtttgtttgtttgtttgtttgtttgtttgtttgtcagaagttttaagttactgacttaatttctttatttgtaatagatttattcagatttttaatttctacctgtcagttttgggagtttgtgcctttctagaagtttgtccattttacttccattttctcatttgttggcttacggttgctcagtttatttccttttagtgtgctatagaatccctttgctttctgtaagcttggtagtgcttcctctctttcgattctgattttcacaatttgagccttctctcattttttcttggtcaccctagctaatagtttgttgattttgttggtcttttcaaacaaccatcttttggtttcattggtttcctttattgttttctattctctatttcatgtatttctgcttaatctttgttattttcttcctgtgcgtgctttgggttttgttttttcttatttttctggtttcttaagatgaaagtttttgttgatttgaggtctgtcttttttaatacagtcattcacaaatataaatactcttctaagcactgctttagcttgatgtcataagttgtgctttgttgtattttccttttcattaatctcaaagtattttctaatgtccctgtgattgcttcattggcctattggttatttaggggtgtgtcatttaagttccacatctttgtgaattttccaaatttcttagtgctgttgatttcaaatttcatttcgccgtggtcaaataagataccttgcatgacttccatcattttgaatttactgagcatatggtctgtttgggagaatgtctatgtgcacttaaaaggaataagctttttacaacttttcatttagcataaccatagcttttaattttgcttgattttttttggtaaggcttgatggaattattagttctacaagggtaaagggtttagtttaaattgacattgcatgtaaatatagtgttttagagggcttggagtatctgtctacagtccatctggtctttcgacagctgttgtcaggcatcactctaaagacaggctagcaaggaaactacctaaggcagagtcttcatgtggagagcctgttcattatgttagtttaacaaagggaattgtggcagttacatacagtgcttcgttgctgaaagaaggcatgcatttgcacagcagagttatttagaggtacccaaagaggagcgggtaagcaaggtgagcactgctttcttttctgaattgactataacatcaatacaaacataatgtcaagaattaactgtaactttcaatgttgaaacaaagaaaaagaccgatgtgtgttttcttataagactggaggacagatgatgcctctctctctctgtctctctttctctcccttgttttggcagtgataggccaaagggaagcacattgttggccagttgatctaaaagttcctttgcatcattctggtaatgagcaacaaaggcacttattggcaaacgttccatcttgaataactgaggtcagcagtttctttatcaaagcaacccaggttaaatatgctcttttatgatctaacacactgtaataatcaaatcaccatttttaaaagcaacccagaacattattgaaaaatagcttttttgttttaaaataaagcagtaatacaaaacaatgcttaagttatgagttacaatgaatgctttcagtgtttatgaccttcccagatagtctctaggaagattgtctgtattctgactataaaaataggaccaggatgaagtttttttgactgttactgctggtatatcctagatactctgtgctattttctgggcttttcctttgctgcctaagggagagaatatcacatctatcaggtcaagacttgtacatttgccacaccaacttagacctaacatgtttgcatttatgttcaaccagtccatagtgtatgatatactccattgtctttgctataaaagaaaggcataatgttaagaatatcttttatatctatattgagtaattgccgtgcccttacttagctggttcattttgatcccaaattcagtgtttcttcatttagctttttgatgacgtactgaataaacagtgtcgcaatatgtacctattttgctcatttaagaaaatatttgtaatcactaccacgagggtttttcattaccatctagaagcaaagacctctgttttccttcagttaactttcagtatcagaaattctaactgtttagcaaaagaaaccataaaaaccatttatgtggatcagtgagcctttactgctgtctgcccaggaggaactcaataaatgcctcttgactgatggaaaattgctttggtaatactaagcagagaaaatatgaagagtacgtaacacattgcttgatgcatggttcttggctgtactgcactgacatgtaactaatgacagaagttcatgcaaagtctatgactgtcagacttttagaatatagactggtatcatccaaatgacggatgtatgtttgcaccagtgttggctcagacagtttcttagagctttggggtttcctctaaaatatagttccaccccaggctctctcctgtcaagcagacttgaatccctggaatggctctagaaccactttggcttcattaaaacatttgaactacttgtggacaattgagcaccatgactttcagaagtagagaccatcaaatgatacggcagcatttctttttttttttttttacccttgatttttgttgttttattttgtttactagactcatttagccatctgtggaaaatttttccaggaacacagccataattttttttattatacttttaagttttagggtacatgtgcacaacgtgcaggttagttacatatgtatacatgtgccatgtcggtatgctacacccagtaactcgtcatttaacattaggtatatctcctaatgctatccctccaccctgcccccaccccacccacaacaggccctggtgtgtgatgttccccttcctgtgtccatgtgttctcattgttcagttctcacctatgagtgagaacatgcagtgtttggttttttgtccttgcgatagtttgctgagattgatggtttccagcttcatccatatccctacaaaggacatgaactcatccttttttatggctgcatagtattccatggtgtatatgtgccacattttcttaatccagtctatcattgatggacgtttgggttggttccaagtctttgctattgtgaatagtgccacaataaacatacatatgcatgtgtctttatagcagcatgatttataatcctttgggtatataccgagtaatgggctggctgggtcaaatggtatttctagttctagatccctgaggaatcgccacactgacttccacaatggttgaactagtttacagtcccaccaacagtgtaaaagtgttcctatttctctacatcctctccagcacctgttgtttcctgactttttaattatcaccattctaactggtgtaagatggtatctcattgtggttttgatttgtatttctctgatggccagtgatgatgagcattttttcatgtgtcttttggctgcataaatgtcttcttttgagaagtgtctgttcatatccttcacccacttgttgatagggttgtttgtttttttcttgtaaatttgtttgagttcattgtagattctggatattagccctttgtcagatgggtagattgcaaaaatgttctctcattcttaggttgcctgttcactctgatggtagtttcttttgccgtgcagaagctctttagtttaattgaatcccatttgtcagttttggcttttgttgccattgcttttggtggtttagatgtgaagtccttgcccatgcctatgtcctgaatggtattgcctatgttttcttctagggtttttatggttttaggtctaacatgtaagtctttaatccatcttgaattaatttttatataaggtgtaaggaagggatccagtttcagctttctacatatggctagccagttttcccagcaccatttattaaatagggaatcctttccccattgcttgtttttgtcaggtttgtcaaagatctgatggttgtagatatgcggcattatttctgaggtctctgttctgttccattgatctatatctctgttttggtaccagtaccatgctgttttggttactgtggccttgtagtatagtttgaagtcaggtagcgtgatgcttccagctttgttcttttggcttaggattgacttggggatccggactcttttttggttccataggaactttaaagtagttttttccaattctgtgaagaaagtcattggtagcttgatggggatggcattgaatctataaattaccttgggcatcatggccattttcacaatattgattcttcctatccatgagcatggaatgttcttctgtttgtttgtatcctcttttatttcattgagcagtggtttgtagttctccttgaagaggtccttcacatcccttgtaagttggattcctaggtattttattctctttgaagcaattgtgaatgggagttcactcatgatttggctctctgtttgtctgttattggtgtataagaatgcttgtgatttttgcacattgattttgtatcctgagactttgctgaagttgcctgtcagcttaaggagattttgggctgagatgatggggttttctagaaatataatcatgtcatctgcaaacagggacaatttgacttcctcttttcctaattgaataccctttatttctttctcctgcctgattgccctggccagaacttccaacaccatgttgaataggagtggtgagagagggcatccctgtcttgtgcgagttttcaaagggaatgcttccagtttttgcccattcagtatgatattggctgtgggtttgtcatagatagctcttattattttgagatacgtcccatcaatacctaatttattgagagtttttagcatgaagggttgttgaattttgtcaaaggccttttctgcctctattcagataatcatatggtttttgtcattggttctgtttatatgctggattatgtttattgatttgtgtatgttgaaccagccttgcatcccagggatgaagcccacttgatcatggtcgataagttttttgatgtgatgctggattcggtttgccagtattttattgaggattctgtcgatgtgcatcaaggatattggtctaaaattgtctttttttgttgtgtctctgccaggctttggtatcaggatgatgctggcctcataaaatgagttagggacgattccctctttttctgttgattggaatagtttcagaaggaatggtaccagctcctccttgtacctctgatagaattcggctgtgaatccatctggtccggggcttttttggttggtaagctattaattattgcctcaatttcagagcctgttattggtctattcagagattcaacttcttcctggtttagtcttgggagggtgtatgtgtgcaggaatttatccatttcttctagattttctagtttatttgcgtagaggtgtttatattattctctgatggtagtttgtgtttctgtgggatcggtggtgatacctcctttatcattttttattgcgtctatttgattcttctctcttttctttattagtcttgctagcagtctatgaattttgttgatcttttcaaaacccagctcctggattcattgattttttgaagggtttttcgtgtctctatttccttcggttctgctctgatcttagttatttcttgccttctgctagcttttgaatgtgtttgctcttgtttctctagttcttttaattttgatgttagggtgtcaattttagatctttcctgctttctcttatgggcatttagtgctataaatttccctctacacactgctttgaatatgtcccagagattctggtatgttgtgtctttgttctcattggtttcaaagaacatctttatttcagccttcatttcgttatgtactcagtagtcattcaggagcacgttgtgcagtttccatgtagttgagcagttttgagtgagtttcttaatcctgagttctagtttgattgcactgtggtctgagagagagtttgttataatttctcttcttttacatttgctgaggagtgctttacttccaactatgtggtcagttttggaataggtgtgttgtggtgctgaaaagaatgtatattctgttgattttgggtggagagttctgtagatgcctattagttccgcttggtgcagaactgagttcaattcctgaatatccttgttaactttctgtctcgttgatatatctaatgttgacagtggggtgttaaagtctcccattgttactgtgtgggagtctaagtctctctgtaggtctctaaggacttgctttatgagtctgggtgctcctgtattgggtgcatatatatttaggatagttagctcttcttgttgaatgatccctttaccattatgtaatggccttctttgtctcttttgatctttgttggtttaaagtctgttttatcagacactaggattgcaacccctgccgttttttgttttccatttgcttggtagatcttcctccatccgtttattttgagcctatgtgtgtctctgcacgtgagatgggtttcctcaatacagcacactgatgggtctcgactctatccaatttgccagtctgtgtcttttaattggcgcatttagcccattcacatttaaggttaatattgttatgtgtgaatttgatcctgtctttatgatgttaggtggttattttgctcattagttaatgcattttcttcctaccatctatagtctttacaatttggcatgtttttgcagtggctggtaccggttgttcctttccatgtttagtgcttccttcaggagctcttttagggcaggcctggtggtgacaaaatctctcagcatttgtttgtctgtaaaggattttatttctccttcactcatgaagcttagtttggctggatatgaaattctgggttgaaaattcttttctttaagaatgttgaatattggcccccactctcttctggcttgtagagtttctgccgagagaccagctgttagtctgatgggcttccctttgtgggtaacctcacctttctctctgggtgctgttaacgttttttcctccatttcaaccttggtgaatctgacaattatgtgtcttggagttgctcttctcgaggagtgtctttgtggcgttctctgtatttcctgaatttgaatgttggcctgccttgctagattggggaagttctcctggataatatcctgcagagtgttttccagcttggttccattctcctcgtcactttgaggtacaccagtcagacatagatttggtcttttcacatagtcccatatttcttggaggctttgttcgtttcttttttttcttttttctctaaacttctcttctcacttcatttcattcatttgatcttctatcactgataccctttcttctagttgatcgaatcggctactgaggcttgtgcatttgtcacatagttctcgtgccttggttttcagctccatgaggtcctttaaggacttctctgcattggttattctagttagccattcgtctaatcttttttcaaggtttttaacttctttgccatgggtgcaaacttcctcctttagctcggagtagtttgatcatctgaagccttcttctctcaactcgtcaaagtcattctccgtccagctttgttccattgctggtgaggagctgtgttcctttggaggaggagaggcactctgatttttagagtttccagtttttctgctctgttttttctccatctttgtggttttatctacctttgtgtctttgatgatagtgacgtacagatggggttttggagtggatatcctttctgttagttttccttctaacagtcaggaccctcagctgcaggtctgttggagtttgccggaggtccactccagaccctgtttgcctggatatcagcagcagacgctgcagagtggctgatattggtgaacagcaaatgttgctgcctgatcgtttctctggaagttttgtctcagcggagtacccggccgtgtgaggtgtcagtctgcccctactgaagggtgcctcccagttaggctactcaggggtcagagacccacttgaggaggcagtctgtccattctcagatctccatctgagtgctgggagaaccactactcccttcaaggctgtcagacagggacatttcagtctgcaaaggattctgctgtcttttgtttggctatgtcctgcccccagaggtggaggctacagaggcaggcaggcaggcctccttgagctgcggtgggctccacccagttcgagcttccccgccactttgtttacctacccaagcctcagcaatggcgggcgcctctccccaagcctcgctgccgccttgcagcttgatctcagactgctgtgctagcaatgagcagggctctgtgggcataggaccctccaagccatgtgcgggatataatctcctggtgtgccatatgctatgaccattggaaaagcgcagtattagggtgggagtgacccaattttccaggtgccatctgtcacccctttctttgactaggaaagggaattccctgaccccttgcgcttcccgggtgaggcagtgcctcgccctgcttcggctcatgctcggtccgctgcgcccactttccgatactccccagtgcgatacctcagttggaaatgcagaaatccccggtcttctgcgttggtcacgctgggagctgtagactggagctgttcctattcggtacagcagcatttcaactgcactgatctgtggtcatctagtgacaacactagcagtgccacccgggcttccctactaaggatattagtgttcactctctccgaaccgttaccttttgtgaatttttttccgtcacttctcaaccataagtatacttagcctatatcttgggcataatttcagtgtatgtaattccattatttttgagtattgccctcctggcacattgaatgtatcttctgactcatcattttctgaatcttaaactataaaatggaaaattatgccttctgtagatgtttctatactttctcaaaccatttctgcatgtatagtacctcctttgtttcttgtaatgctacaagagttgagagctcagttgcagatgacagaatccaggcgaggctttctaagcagaacatgtttggctgcttcctacccacctggaagtaacacagggaggagggcagctactagacagttcagcacaaatgctgctatttcagctgcatgtttgtgtgttctgtgtcaacataaaccccccttacatttccaaacaacagcagcaacaatttatttacaccatcatacagctctcccgtatagaaataatgagggtctcactctacctagagggcagtcccaaaatctcgtttgtttctgcagttggttccaccagtgcaggttctcagggtgatcgttctttctttctctaatttaggcagtgttctgtcttagaattctgggatcctgtaacctatagaatgaattgcaaggctaatatcaccaatagaccctatctaaaactggggaaatggagaaaggaaattagttaacatgcataaatatatacttgccacaccgagagaggaagaagtatgcataattattagacttctcatttctacaagtggttactacccattttgtggtctacatgccctaaagtatccaaatgtattacttagtgggtttacggacatatgcagtgttactggcagacagtgaagacaaaaccaaacctgagtaggcatatcttctagtgaggataaaatggtatcctgtcatgatagaagggattgagtgtaattaaccggttattatgtagcaggcggtccctccaaatcgattgttgttcctagcaagttgacactccactgtgttgggaaatagctgagctctgtgcagggaggctgcccatgttgtacttctaccactgtggtcactttgctaatgagcccactaaacaacctctgggctactgtggagagagtgagacaagcattcatagggtgatttatcatgtccacctggtttttgagagccttctctccagtaagcattcagatggacaccgtatctgtcttactcctggttcaagaaatccacccatatgcctcttcccagccacctgctgccagctcctcagtcttcttcctcctttgtctgtgctggtcaatgtaagttctgattctttgtgagtagaggcttgtactgcaagctgtctttcagttgggtcagatagtccatgatatgtgcccataaagcgtcttcccaatggtttagctcagtagttgctgctgcccatgaatcagtgtgattgatacctcatgccatctcttctgggcagactggacccaagacatgccatgggaagctctgctcctctgtcagggccttctgtgaaggaagctgcaaagctgtaacagccgatttcagctgctcatatcgtgttgctccatctggatacgagctcctcagacagctggtcatgcagactttcccatgagccctggtggggggctgagggaaggatggcaggatgcaagagtaggcacatcagtaatataagcttcttgttgacggaacttaattttggatgctattcacacctaaatatgctatatatatatgacttttacttgaggacacagtatcctggacatgtccttctctgtagccccaatacccagttcatgtgggtcccatggccatgttttcacagttaactaacatgaaatgtcagctgttcattctccactaggagccagtattaagccaatctgtgtgtatcaaaaggaaaatagttacttgctatatagagtattgtgtgaccccaaaaccttgggacttcccactcttctgttttgacttcgagtatcccagttcattggccacatgagcaagggcagagttgcttgccttccatcctagcccatatggagggctttttcttggcccactcaatactggattgagtaattatgggttactcagtaaatagatcaaggtagtactcaaaaggctaccctgggagcagactggaggaatgtgttctctgccctcctgcaaatacttgccttaacaagctattctcaggtattgttacttctcactaacaaatcctatcagcatgatgccatcatgtcttgtgggctggtaggatgattgacgttcctatagactgagttatggcacagaaccagaattgacacagtgctcaggcaagatggtgaaagcaagtagctttctgttttcctgctattgggataggaaaacacgtacatgcaaacacataccacttttgtcatatcagtagctgcacaccagataagggaatgcattgacttgatatactgagtttgattaactggagtttctccttgataaagtttggtataatccactgtcattctcaaagacctatgtgtcttctgcacagggctgcacacacaaaaagagatgtgataggagtcaccaccctgaacctttcaaatctttgacagtggcattaatttttgcagttcctctaaaagatgccgtgttgctttcggttgctattgtggcagggaagagaagttcagaagcttttcttgagcccctcgaattctaacaatgctcactgcataggtcaagacacaactgtggaaattctccctgtgtgtaagtgtagatcccatctgtaaacccaggttctggcaggtaataataccacagtctccatttgtatctgacccccacgcagcttccaccccaccatcaggacacagaggtgttgagtcctccgggagaatgtccaataagtgctgagaagtccggttgtttctttttctcctcaaaagtagctgcacatcctttgggaatgggtagaagaaagacttgttacatgattatgtattatggaagtgtccttccattttatatatatatatgtatataaaatggaagtgttctttcttaaaggaccagccactccttcagtgagaggctgttggacgagagaagagcggctattgaggctgtcgtgctggatccctctaggcctctgtcacctgcctacagatcagattagagtgtctgaggctttcccactactctggccctacagaccctctcattaactgtccattcccaaatacccagctagcttacacacactttggcccttcggcttgttatgttagccagatcctcttgcctctggacacttagctctgctacctcagccattcctgttcttgtagaaatccggaagcccttgaggcagcatctgcaatgctggccggaattcctgtctgtagcctcttgggagtgtagttacgaggtgggtaagcaggagacatggtagatccccctaagtctatatttctacatctgtattttatcaagacattcctggcatctagctattctagtttctattacagggggctgttaaactatgcagaaggtagaagttttaaggtacttggttttagggcccaggagagtgccacttatagactggcattttggcaactgtgatgaactcccagttttataccttggatatctttctctagtaacatattacaacatctaacagacaaaaaagcaagtcgcataacttttcagcctactttcacatttattttcttacttcctctttagataactgtatggtattcgtaaaactagattcttacagatgaggaaagaaattcagaaaaggtaattaacttttctggggcagaactaggtctacaacgtatatctcttgacttcttgtcctcttttgttacaacacaaataccatggtggcacgtggatgtgtgcatgcgtataatatgatgcactcacacatacgtgacacacacaccacacatcacataccacttatgcacataccacacacatgcacacacacacacacgacacacacttaacacacatctgtacaccacacacactccctatccagaaactacaatttgtgtcatgtcaaatgttgatgctcctaaaaacagcatgtattattaagaaactcaaatacagcaattttttttgtttggatgaaggtaaaatctgcatttcgatttcagctataatcattacttgcaatgtgggggttttttttcctaaaaattctcacctcagaagttgcccaaaacccaactcatgaaggaatcttcagtctcattattaatcaaaaaaagttaaattaaaatatcttggcaaaatgtctgtgtcaactctatgtgtaattatgtgtgcacacacaaatgctgacagagttacagtgcggaggctgaaatgtgtaattgtcttactgagtacagttcttttggaaattagcatagcaatatgtagcaaatgtcaaaagaaattgcatacttaatctagatgtccatgcctgcaagtttattccaaggaaattgtttagcataaaaaaattatgtgcataaagcatttttttttgcaatagaactcttctctccctcccaaaaattattttacagttttagagtttcataaagtatgaaagatcataatatattaaatagaatggggaaatattcagtagagtatttgcaaaaaaaaaacaaaatgttgtgtataatgtagttgcacaaacagttaacaaatatacttgttgaattgttgatagagtctaggaagttacaagtgaaaaattgtataagaattatgtgtatgtttggaattttttgcaataattacaatcttcagtttctatgtctatataatatttctttttagtgaaaatacatccactacttgtttttggttatttttatttttttcattaaagtccattgatcatcacaaaaacccaggaaatacaactaaggagaaaacaaatgttcaaccaacacctaagaacctagagctgtggaggagatgtcacactggactactggtgtgtacaagggggcaggagggatgatccccatggggcatggccactggctgtgagaaacacaggagagaggccaggcagctgcctgggcagttaggttcaccactgcatgatggcagcattgagcaggttggcttccttcagggtccagctctcgtcagccagctctttgtttgggaaagtagtcatgaggataaagctggtggcagccatggctggccgggcatccacaatgaagagttggatgttgctgatcctgtggctgtggttaaatttctgcaccagcctcccaccgtctgcaagccgaatttggatgtttgtggtagtctctgattcgacgattaagatggaagagctggctttggcttcattttctgccagttggactggagagatggtactcaacacctagggggcagtgctgctcggtgtctgaccctcgccagtgaaggctttgaaggcttatttggacttcataaagtcctcgtcctgatgttcctccatatccaagttcgcctgtccactgtgagctagcctccacagctctgctggcacctcccttctgtggatagactccagaaactgggcatcggatgggtctcagtagcttctgagtcctccattatccaggctgaatccactcttgcagagtttcagtactacatgaacatcttggttggaatgatgtctcttttctcctgccacataagcagactcttcctctggtgctgccccaaggccatagccatctccggcaaatggtcttggtgtactggtctctccaggtctgttggtcactcgctccacagctacagctccatgctctttggcacctttaaagagatcatccaccagctcattggaacttttctttctgggagggccaacaatctgctgtccacttctctctgaggccccggcataaaacctctggccttcctcctcttcctcatcctcatcttggtcatgagtgagatctctaaaggatgtcactctattatcactaggggctgtgcctctggacactgaactgggggttgcctgtgaaatggttatgatgtcttcttcccctctgtcctcataaaagctcgctagcgcaatctgcaagtcccaggtagccgactcgaggaagaagcaggcccggtcctgctcagtgcccatcaccaccacgaactctctcagcgtcttctgttgctccgctgccgtcttcatcccatgcgcctccccacatccactactttcttatcatttctaaagcatccttgagtgggacttttgtctttctcctgagagggagcttagcgactgggttgttgaggatggtttaatagagggggatgtgctagctgaaacccaaactcttgtgttgttcgtctcaccctgtctacacactgttgcctatggtgattggtccactgaggattgttgttaatcagtttttacttgtttttctcctcccccaagtccaaaagtgttttgaagataaacagtaaatatggcttataaagccagctctgttccccctctctctgttttgggaggaagacattgtgcatttttagagcataacatgaaggaggttttagtataatatgatttagtgcaggcctcagctgctatctctcccagtggttttgctggaggctggagcttcccgacagccctgaccacggagaggtggaatgtggcgctgacgtcacggctgctcctgggaatgttttgcattcctcttcctggcagtggtcaggtggcttccagcaagaatgaaggacagcagcttccaaagaagaaaaaaagagaggaggaaaaggacagtttataatcaaagtattgcgggggaggcacttttattctgagccaaaattgaaattagaaacagatgtcttgcattccgatgcggcacgaatgttaaataaatttattaatgactgtaataactaagctatttggctttttactgaacttaagtcttgaaactctgtaagaattatggaaaaacgacttcttgtagttgacattttaactatgaaagcagctttctgactgtaaaagcaaggaccctgatgaaataaccctctagttaatctacaggctgttttaaggtctgttaatattctgaaaggtcacttctgaaacataaaatctctgtaatctattaacataatttgtgctgttcaaacaaatttaagccaatcattgagagaggtaaactctattttagcatctgctgcagaatgtcttttctcaaaatatttacacttccaatgttatttctgtacattactgctcaaaccagatattcaaaacaaaacagattcttaacaaacaggttttgcccaagtcttacaactctgcaataatatgtgtaatagaaaaatagacagtaattgaaaagtttgtgtttttcttgtcttccagccactaaagtacctctgttcaaaatcactatacgggtttagctaattacaatctatacgtctgtattttaaaataaaatgttatactttttaaaaaaacaacttgatgtctttcagtagatttggactcattttgatataacagcagttacattaacaacagttctccagtttaggtgaaatctgtttgaatacttcctgttatacattgaaatggaaagttggcttcctcttgtaggtcatgttgctggtgaggaatttccagaaatctggagaagtgctgactcatagtatacagtggactgatccagcaacagtaggacttgagggggttttttgagctattggctgaggcaagcaaaatatgtggctgtaatgtttcattttatttttagatataagggtgagggaggaggagagactattgcttggcatgggatctatgttaatagctttaaaatggctacaagttctagggttagaggtgtgtctaaatgtgtgttttcctacagtctattattagaatttggaaaacaggttgtttttgctatagtcaccctactgttgttctctctgcctcttgcccacaggtgaaccatgtgccttcttgggctgtggttggtgactcaccatgggttctataatgtgaaagtcacatagtacttgcattcaggagagtgctgcagaaaaaggtccatggcattgcaccttttgtatctgatcaaaagtccgtgaatctaataataacaatttaagtattagctgacaggagtacagagaaaaactagcatttgttgcctttaatatgcctgcttgtgtcctgtatattttacattcgttaaattgtctgactctgaagttactgattgaggtttttttcattcatttggtatagaaatgactgctagattgggtttggtacagggatttctaaaacaaaaactcatcacctaaactcatccctggtctcataaagttaatatatcccaaatgcacttgtctatcaattctacaaacatgcactcactgctctgtgttggtgctgatgacatggagaaaaggaaaatgtgctccttgttacctgtttgaggggagggaggcgctgggagcccactgcaggggatgtgtctacagaaatatgtatagtgttacttttcagttactatggtagaaatctaaagaaacagtgaggcataaaagaggggtatgctcaaatctgtgctaaagtctgtggaagtggttttttggatgtgattctgaggctgtcagagttactgattgaaagtaatttgaataggcaatgttaggagagacataaaaaatagaaatcagaatatgatgagggagataagggaaatataagtatttaggtgactgatattaagatatctgaaaaggaaaaacaaataaacaatatactacaagttatatttgtatgtgctttgaggccaacacccaaaacagcacacatggtttcacaagcacctctgactgctttcaaaggctgtaaaaggctatgcttttcaaagacattcattctacccttatgtttctgaggtttatatttttcatcatttctgaggaatttgaatggctatttgttaatcataaggattcacaaaatcatagaaattattttaaacacgatttcctgttttctttaaagttcagcaaaaggaagagcatatgtcctccttttgaacagaggtcccagggcagggtaggggatggaaatgggaggctgggccacactgtgctgtggaggcttaacctccacatctgacccccactagccttcaactgattctagtgtgctttctgacaatagcccattacttaaattttctatctgccagtttcttctgctaaaagatcttctgctaaagaaaccagtgacctattttggtgcttatgaggaattacttacagaattaagctcatagttcaaaatatgagggattgttctctgcttttttaagtgtgtgttctccaaacacttagcaaagaagaaccttgtcaacatctgcctgataattctgtcttgagaatcaactgaatactgttatgtggttgtcctgagctttgatgtcctctggtatagaaaagactgaaagtgatgaaggtggggtataattaaggcctgccactgtccccaaggatccttgggaagtgtcccaatccccttgggaggctaatctacaaatcttaggaccagaatagtgacatatatggctctataatagcacttacaggactttattgtattttgtctctcattcccagtactgtatgaaattctaggtctaaattgtctgacctgtttttctatgcagatctcataagcgtatagatatttaatccatttgttgactgaataaatgaaattgctcttccttgaggcagaaatacatttcctctgtaagcttttgtgtgtatacacatacagtccatgaaatgcctttttttcctttttgagacggagtctcgctctgtcacccaggctggagtgcagtggtgtgatcttggctcactgcaacctccactcccgggttcaagcgattctcctgcctcagcctcctgagtagctgggactacaggcgctcaccaccacaccagcctaattttttgtatttttagtagatacagggtttcaccgtattagccaggatggtctcgatctcctgacctcgtgatccgcccgcctcggcctcccgaagtgctgggattacaggcgtgagccactgcgcccggccagtgtctgctttttaagacacaaagtctgccttcgttgcccaggctggtcttgaatgtctgggctcaagtagttagttctttggctcggcctcccaaagtgctgggattgcaggcatgaaccatcatacccagcctcatgaaatgcttttaaaaaaaattgtggtaaaatatgcataacataaaaattaccattttaaccatttttagatgtattttcagtggtattaactacaatcataatgtggtgcaaccaacaccgctcttcatttccagaactttttcatcatccccggcatgaactctggtgcctactaaacactaactccttctccccacaagtccctagcaacctctattctactttctgcctgtttgaagttacctattctaggtaactcttaagtggaatcatacaatatttgttattttgtgtctggcttattttacttagcataatgttttcaaagttcatccacgttatgtgtcagaatttccttccttttttaaggctgaataatattctattgtatgtatatgccacattttttttatccattcatctgttcatcctgtgaaatattaggtttgttttcacttcttgactactgtgtgaataatgcttctgtgaacataagtatacaagtatctgcttagtttctgctctcaattttttttcggctatagatctaggagtggaattgctggattttatggtttgacttcttaaggaactaccatattgttttccacagaggttgcatcattttatattcctaccagcaatgcatgggagtttcagtttctccacattctcaccaacacttgttattttctttttttgataattgccattctaatgggtgtgaagtggtatttaattgtggttttgatttgcatttccctaatgacttgtcgcccaggctggagtacagtggcacgatctcggctcactgcaacctctgcctcccaggttcaagcaattctcctgcctcagcctcccaagtagctgggattacaggaacctgccaccacgcccagctaattttttgcatttttaatagtgacagattttccccaagttggccaggctagtcttgaacttctgacctcaagtgatcaacccgtctcgacctcccaaagttctaggatgacaggtgtgagccaccgtgcctggcagatacacctttaaattctgaaatacccccacttaaaaaaataattattactattacttgcaaaataaaagtctgctactaagatacagagagttcctcatcaatcctttatactctaataccaaccctccccatgcccacagacactgggtgcttgatatgaggtgcatatccatggccacagatgtccctgaggctgctgatccctgagggctcagaaaagagtgggcttctccctcattagctagtctgtctacacaatattctgttgatatatttgtgtcaaattcattaggtatccaaaatgattatgttcatctatcctgattgtagttttctcagaaaaaaacatacttttaacctaaagctatcaatagtatgtaggcactaaataatttgaaaagaaatttgtgaaattattcacagtgagaacatcttgtaatcatgaaatcaatgaaaaatttgctaattttcgtggtttcattattcgtatttaactctttaatccatctgaaatttattttgatgtatcatttgagggtagagattaattttaattacttttcaaacaattttatcagcactactttctgaataattttccctcactgattttaaatgcttctcctattgtatattatattcctatacatcataagagttcttgcctctgtattctatttcattgtgttatagcttttctttttcattctaatctctttcgttaagctaatatacattctgtagttggagtttttactttaaattctaaggttgttaatacttttaaaaaatatttaaagtaattgtaggctattcagtgagtattcacagatattctccatgtgaaagagtgcattggtggcaattcatagatacattggtctggcacagcagccaggcactttgttagttccactttcacctcatgctagacatgcaggcatcctaaaagttcaggtgtattcttgtgatgtgcttattattatattcaggaacttattaatagaaattaaattatagaacctgctgctccatttaattggctacaacattcttggaatggtaagtattttgccttgggcttcacctaattatctctgttagaagtgtacaaatgtttacagcatttcctttttgaatatttggaacaaatatttttatttgatttatgatgcttttctctttatttgaccaagaaatgttatggtggtcccattatgtgtctagacgctgtgctgaaggcattgggaagcaggagcacactcacaccagagcctcacatctagtgacagccactcgctagaactggggtgatagggcatgttgttatatcactgaagtcttctgctacttttttttttttttttgagacggagtcttgctctgtcgcccaggctggaatgcagtggcgcaatctcggctcactgcaagctctgcctcccgagttcacgccattctcctgcctcagcctcccaagtagctggaactacaggcgcctgccaccacgcctggctagtttttgtatttttagtaaagacagggtttcactgtgttagccaggatggtctcggtctactgaccttgtgatccgcccgccttggcctcccaaagtgctgggattacaggcgtgatccaccgtgcctggcctcaagtcttatgctacttttaaagtcttacgttagcaaaatgaagaaatgtgaataattggtgaaacctttgaaagccaagctctaagattcctgtaaagaactataggttggaaataatttaataatgccaagtacatatgatcaagaaaatgatagagtggacagttctctgacctggctatgtgttttgttgttgttgttgttgttgttgttgttgttgttttggagacagagtttcgctcttgttgcccaggctggaatgcagtggcgcgatctcagctcactgtaacctctgcctcctgggttcaagcaattctcctgcatcagcctcctgagtagctgggattacaggcgcatgccaccatgcccaactaatttttgtctttttagtagaggcggggtttcatcatgttagccaggttggtctcaaactcctgacctcaggtgacacacctacctcagtctcccaaaatgcagggattacagaagtgagtcactgtgcctggccaccatgtgttcttttaagccccataacaaagttttttaaaagatggctttggtcaagcgcagtggctcacgcctgtaatccgaacacttttgggaatccaaagtaaggagggaagatcacttgagactgggagttcagaactagtctgggcaatatggcgagaccctgtctgtagtaaaaaaaaatttaaattagccaggcatggtggcacaggcctgcagtcccgactacttgggaagctgaggtggcaggattgttttagtccaggaggtcaaggctgcactgagctgtgatggcaccactgcactctagcctaagtaacagagcaagaccctgcctcaacaaacaaaaaagatactttgattatatgttataacaagtttccaaaaaaaataaaaagattaatttataaatacatatgcttgattggagacatgatctttaaaaatttttaaacaaggtatatgatcaaagacaaccgaattagtcaatgagcatagagtgtgacagattttaaaattctacctctcgtcattatattaagcccttataccaattggtatagcacaaattcatcctgaatcctgtgggaggaaaggggttagctaccaataatcttatagcctgaacttgactatagataatatagttgtatttgaatatggagtatctgttatttgattcccacttagttatctttagttttcctgaaaacttataaacaggaattttagggacacgcctcttgtaacacagagaggcaaatattttataagctctgtatacattcctgcattgatcagctggctcattaaatgatcccccagcttgttaatgatcagttgaacgtgtgtaagccccatagatgagagggacctgttccattcatcttttttcttccttttgaaactggtatatgttgagtgtctgatatgaattgaacaaaagttgaattgtttaattttatgcttgtatcaagcaagctcccagaagtctggctaaagagtagtttgttcatttaaaaatctagccttgagaatctttgtaccatgaatatttttctctctcagccccagagccaattcccacccctttcagtctaatctttggcagcacaagaccgtgtgctggaagtggcatgaaaattcttaacttattcctttcaaaaaagaagctaactgtatttaatgctttgtgtaggctatttcttttcatccttaacacaaatggaagggaggtattactgtaaatttgcagatggggaaactgaagtcatcaaggttaaataacttgctgaattcccaccaccagtggatcacaaagctgtgtgacactggacatgacttcccaaaagaaccccatcttgccatcctatgatctgtagatgaaagtagggtttgctgatggccctgagaaaatcttaacaaactggatgaggctcaaagacttttccagggatatggctccagaactgtgaccttccctttatgggtccagcatgacatcgtcctgctgctccatatggcatcaatgtaagtatagacatggccttgctctgaagaatagtaaaaagacttcacttctttagaggaaaatgcatgtgtaccattttgagaatgaatgttggatccaagacgtctgtcaatagagaggctccgaagaatggggtgatacgtcacaaagattggatgggatccatgtatgcctctgaacccttccttgtttctagggagctgttccaaggcaaagttgaggtcaacctcattcagttttaccagagatttaattggacatgctttggctaatcaactagtaataactgtgtttcacatttcttcctttccttactgctttctccttaagagcaaataattaataccagaaatttctgtcttgggtattatgggacgtgtgtggctataaatgaagaaattacagaacctacatggaagataccagaaacaatacccagtcgttttgttgtgatttttttttcttttttttttttttgagaccgagtctcactctgtcagcacaatctcggctcactgtaacctccgcctcctgggtccccattcaagcaattctcctgccttagcctccggagtagctgggattacaggcacgcaccaccatgcccagctaatttttgtgtttttagtagagatggggtttcaccatgttggccaggctggtcttgaactcctgacctcgtgatccgcccacctcagcctcccaaagtgctgggattacaggcgtgagccaccgcgcctggccactctttatttttttattttcctctactcaagacagcttagaagagagatccattttgcatttggaattcttccagttagttttgaaatctaatcaacaagattggggagtgttttgtgttaatgaaatatgttcctagttcttagaaatatatgaatgaggccaggcacgatggcttatgcctataatcccagcacttggggaggcggaggcgggtggatcacttgaggtcaggagttcgagaccagcctggccaacatggtgaaaccccgtgtctactaaaaatacaaaaattagccatgcatggtggcaggtgcctgtaatcccagctactgggaaggctgaggcaggagaatcgcttgaacctgagagacagagattgcagtgagccgagatcgtgccactgtactccagcctggcagcttgggcgacaagagcgagagtctgtctcaaaaaaaaaaaaaaaagaaaagaaaaaaagaaacatgaatgagcaggagaaaaagaactgtgatactgaaggggtcagcctctcctcctgtgcgccactcttcccaatggagcatgtgctttgactctggggtttctgcagcatccacaataaatatgtaactgtattttgtatttacccacatgtgttttccctcccatggtgtctttccctaaatctgtgaagaaaataactgttttaaaattcatttattttctccatttggttgtcagcagcaggaaaggctgctgaaggatccgagccagtgtggaaatgggaagggcctgtgagctcagagggaaagaggaagtctctatgtcccggttaccagcatgaccccaggtcaaatgactccctcaccctctcctcctgccaaggttggttagggttcaaatgtgttcctacccaaaatcacacaatgtcactgtgtgggatgcacaatattccattgctttgctctgttaaaaaagacagttaaaagtaagaagtatttgttgcaatttttaaaaacatggtttttaaagctatcttattagtttttaatgctaaaagcattttatttactgaagattcttggttttggataggttttattttttcattaggtggtagtactctgtttctgagaaagctctttattatgcattatttgtgaaatctctagtaacctgatgatgtttctgtcacattgttttgaaaggaatagtttaaagatttaaagtgatctttttttgttgtatgtgtgtgtgtggtttgctttctttctttctattttttatttatttattttattttattttattttttgagcgagggtctcaccctgtcccccaggctggagtacagtgtcacaatctcagctcactgcagcctcgacctcccaggctcaggcaatcctcccacctcgaattgttgggactacaggcatagcgagccaccatgcatggcttttcttttttaatgcaagtatttcttttggaatttgaactttaatactactttggtgtgttttcacctaaattccattttgtgagcttcttagtatttgattgaaaacctatttcgttttacttgaccctaactagatcaacaagataaggatattacccaaaggtcatttctagtaggattgtggccacaaacgtcaattctgtagccaagtatggactaatgtggactgagaacttggcttagaggaaagacgcatttccacctgttcagggaggtttgaagattatccatgttttgagggaaaaggccagctgaatgtggagagtgcaaaggtgtaactgtcacttgagcttttcagaagtccttcgatgtagctgccaacttaaaccacctcaagtccagccagtacagcagctctgctttatcttcagtgtgagtctgtctccctgccggctggtgatgggggtcaggctggatcatggatgcgaccaccctgcacccaggcctgcctctcttttccctgttacatagtgctgggcagcctctgggggcctcacagatttttgttttttagtggtaataacagcatgatcaggccgcagccttctcaataagaagtgctaacttcctcaggaaaacagaagtgtggtatgcaccattacataacccagtttctctggtgatacaattttactttttgagagctgttttgaagtcttcccacagaactgcaggcctctctgttttcccgtatgaggtgaggagatggcagttttgtccacacacctatgaaaaaacacaatgacagattaagtgtcctgaagtgtcggaaggatacctggtgtggtagcttctaaaataccaccaaaagttattttagagatgaattaattagaattgacatctgagttaggttaccaaatgaaataaagggtgccaggtaaatgtaaactttagataaactatcaggcacatgtatgctaaaaaaattattcattgtttatctgaaatttacatttacctgggcatcctgtattttattaggtaaatcaggcgactctccacctgaaactagattatgcaaactaagaattaacataaaaagtactgtcattgtgtggatgagaaatctcctcctcctcttctcctaaaccagtttaggaagcctgtgcttcgtcatttctcatatactctcctcccatgtacatccagattaaaatgtgtgtatttggcatgtggctcactgtttcacatgcctaactgcagcccctctgggatcctatagtcgcagcactattttggtaggtcagccatgggcagcaggtcctgtactctcctgaccacccccgaggaactgcaggctctcagcatttgcgtgtgtccctcctcagagccgtgggacaaccccagccagctagaggcagagagacaggcacgtaaacctcctggcacgtcttgcgggtgcctgggccaaagtatgcgactgtcctgattctctgaaggtctcaaagcattttcatattaagttattcaagtgacccagagaacaagaaaggagttgctactgcatgatgtcagagaacactcagaggttggaagggaattgggagaactaagtaattattaataaattctaaaagtttaatactcagtattcaaaggagaaagagtggagctaacactttgtaccaagggtgctggtcttgggaattaagatatctcctgcaagagatttctgatacaatttagtaaaatgtagtttttaggggagatcttttacagaaggaagcttttatttccaaaggacttcatgaaaggtgtaaaggccacactgtgaattagggatgacacaccctgttttgaattggatttcctgctagttctgatccgaggcattcttcccggactagggtgaattcagttccagtgtttgcttgaaaactgaatctggtcattgtatttgcagtttggcttcctgcctgctgttaaagtacagagcaaacttcagctagttactccctatgattctgtgtcctcctaaagagcagggaaagaagagggaaaaacccagggggtgactgagttcatttacatgttgtgccaaagggcagctgcttgctgccttgtcgtcacaagattctgtggagaatcctgatagtccatttaccagaataggagcctggaaaacaaaaggaaaaaaagtatctttctttctatggttctagctttggcattactaactgaataacctactttctttttctttaaccaacataggtgaaaacttagaaaattttatgttctccctctttccaaagttttctgtatgaagaaagaacttataaaaagaggtcacagctgggcgcggtggctcacgcctgtaatcccagcattttgggaggccagggtgggcggatcacctgaggtcaggagttcgagaccagcctggccaacatggtgaaaccccatctctaccaaaaatacaaaaattagccagacgtggtggcatacgcctttagtctcaactactcaggcagctcaggcaggagaatcgcttgagcccagaagccactgcactccaccctgggtagacagagtgagaccctgcctcaaaaaaaaaaaaaaaaaaatcacaaggcacggtggtagcactgctggctagttggacctggctgtgcctactgagttgtcctgagagaacaccaggttgtgtacatgctgtctggatttgtgggaagtgtggggggcttaccccttttccctgcagttgtagaaaatgtgatgcaatctgctcagtgtagttccagccaccccttaagatacctggcaaaacttagcatagtgtggatcagaaggaatccagaagcatatagtggcaccagcctatgtgtccttacgaatcttgtattcccctgagttaaacttagagcctctgaatttgcggaagggacagaaaggaaagatgttctgttgtggggctgttcccaggctcagcttcctcacactgaggcagtgcatccagtactgaaataaggaacattgcaatgatgcctggggtcagcaagtggccttgctgacatcacaacatgtgcatttctcactgttcttggttatttaattctggtctggtccattggattagagccagattaaacatcaataaattttgagtttactattaacaaagagcagagtcctgctaccttactgttactttgctaggtgctaagagagaaatcagaaaatttaaggcatggattttggtcacagggagcaaaatctagtcttcattggctaagaagccttaaaaaccatgtaactgtcacatagtggcagaccacgagcaaaaagaaaaaaaatgaaccctgcttcttcttggctgttttatggagatggtgcattcagctgcctggtgtttagaggaaccaaatgtacagaaatgaaaccgttcaggagattcccagagctaactgcagggtgctgcagggatgtggcaactgaacatccaggaactgtaacaagacagtgtttaaataggtcaaaatgaagcagtccaaagcaggagttctgacttctggtttctagtctggcatataaggcaggtggaagttgtcattcctgtcttcacaataagaaaaagttgaacaaactaaaaatcaatggtttttagcttcatcagagaattgtcacagaacaaacagctgccccccaaattggagcaaatgacaggcaaataaacagagaatcacagcttcccagagcaaaagacctgaaggggacgtatccagcagaactcagaagcagcctaagaaaacttcaattaattcacacattgccagaggctcggtgtggacaagcttgcaagttacactccagggggtcctgtcttggagagagggggcacacttttgttttatgttttatgttctatgtctaggaaccctgctaggttctcactgtgaagatcagggaacaacccattgtgcttgtatcgggggaagggaaaggtagccatttaacagtataccggagcattcagccctcaagagaaactgttttaccagagtctgaccaattggagttttattggagcccagttaacttggggggaaggaaaaacgccaacaccaactccagatttcctccagccttcctgtttctctggggagaaaaaagcttagaagcacctgtcaagatctcagcccagaggcacaggcttactaaagacctagacctcatcataggactatagaacacctcccataccctgacaccataccaccacatcagcaaggctcctgtgtagtaacagaggaataaaatggaaagaactgagcatctcagaccttatttaagaaggctgtagagaaactcaaagataacaggggagacaaaaacatggacaccagagaaaattttagcttcggaaaacactctagcaaacaataaagacggcccatcattaaagtcgccaggtcaaccagatgtagcctctgtaggtgttggccttggcgaccagcttgggatcagtatggttcgccagatggcccccactggcaccagtcttggttgggttcaccagatgttgcctgtgggctactgttttattttatttttctatttccatctttggacagagagctactattcttttaatggacgtgaaatggtgaaggcacacaagcatattgctgtcattgttttcttgctttcctaaattacttttaccagtggtatatctttttttaaaagctatctacttggagatggtgtgtcttgattgacatctcatggagaagtggatggggaaaatactggttctgtggaaagactctctccgttagtggcttgctcatccagctctgatctttctgttccaggactctccctgtttcaacaacagcaacaacatgataataacaaacctcacatatgttgttccactggataattgtaattttttaaaataaatcgttgtaaaaccaaggacagtttcatcacttttttctatatagctgttcacatggggccaatctgtctttgcaaaaaagaagtgagaaaggaatccttgatactttcccctagaagtccagcatctgcttgtttaaatacatatctcatgtaaaatgggaaagataaaaaatattgaaaagtgaagttttaaaaccttatactaaagatctttatactgcagtctgtctcacacaatatatcattgtctggctttcaacaacaaaaaattactaggcgttctaaaagacaaataagtcacagtttgaagaaacagagcaagcattagaaccagactctggttttgcagaggtgttagaattaatcagactaggattttttttaattcctaagattaatatgttaggggctctaaagggaagattggacaacaggcaagaacaggtgggtgaaggagagaaatggaaaccttaggaaagatcaaaaggaaatcctagaaaccgaaggcaccataacagaagtgaagaatgccttcgatgggctcatcagtagactggacatggccactgaaagaattagtgagcttgaagaaatgtcaaccaagactcccaaaactaaaatacaaaaagaaaaaagagtgaaaaaaaaaagggaacataatattcaagaactctgggacatttgcaaagggtatggcatatgtgtaatgggaataccagaggagaggaaagacaggaagtcaaaaaaagaatttttccaaattaatgataggttccaaaccacagatgcaggaagcttaaacaccaacaggataaataaaacaaaatctacgcttaagcatatcatacttaacctgcagaaaattacagacaaagaaaaaacaccagaggggaagctggcagaaacataccacctatagcggaagaagaataagaattacatcagacttcccttcagaaatcttgcaaacaaaaagatgtagcacaatatttaaagtattaaaggaggccgggcccggtggctcgggcctgtaatcctaacactttgggaggctgaggcaggaggaccatgaggtcaggagatcgagaccatcctggtgatggtgataccccatctctactaaaaatacaaaaaattaaccgggcatggtgacacgcacctgtaatcccagctacttgggaggctgaagcaggagaatcgtttgagcccaggaggtggaggttgcagtgagccgagatcacatcactgcacgcctgggcaacagagcgagactccatctcaaaaaataaataaataaaataaaaaataaaaataaagtattgaagtaaaaaattcaccaagttagaatcctatatctagcaaaaatatccttcaatggtgacaaaaaaataaaacactagcccagacaaaaactgagacaatttgtcactactaaggctaccttgcaagaaatgttaaaagaaattattcaaaaggaaggaaaataatatagatcagaaattgagatatacataaagaaaggaggattataagtgaaggaaaaaatgtaggtaaaataaaacctcaattgatctaacacataagtttctttaaaataatagctaaaatgtattcagtggtcatagttcatgtataaatgaaatgaatgacagcaatattataagagatacaaggaggaattagaaatactttgttattgtaaagtacttgtgccacccatggagttgcatagtgttatttaaaagtggacttgaattacttttaaatgcacatcaaactcaagaggaaccacataaaaaagtaaaaaaggaagtacaatcatatatcacttaatgatggggatatgttctgagaaatgcattattaggtgatttcatcattatgcagacatcataagggcacttatacaagcctaggtgatatagcctactacacatctaggctgtatggtatagcctactgctcctaggctacacacttgtatagcatgtaactatactgaacaccatggaacattgtaacaaaatgataaatatttgtgtgtctaaacatatctaaatgcagtggctcatgtctgtaatcccagcactttgggaggctgaagtaggcagataacttgaggccaggagttccagaccagcctggccaaaatggtgaaaccccagctgggtgtggtgacactcgcctgtaatcccagctactcgggaggctgaggcacaagaatcacttgaacctgggaggtggaggttgcagtgagctgagatcgggcctgtgcactccagcctgggtgacactgcgagactctgtgtcaaatacaaaacaaaacacctttagaaccatggtgtcagaaaaaaaaaatatctaaacatagaaaacgtacagtaaaactatggtataaaggttaaaaatggtgcccctctatagggcacttacctgtctgtaatggagcttgcaggactggaagttgttctggggtcaggggccatcagtgagtgagtggtgagtgaatgtgaaggtatagaacattactatgcactactgtagactttatataaacactgaacacctaggctacactaaatttataaaaaagcatttctttctttaataataaattaaccttagtttactgtaacttttttacttcataaacaatttttcttaattttttatccttttgtagtaacacttggcttataacacattgtacagttgtacaaaattatttcaaaaatattttttatatccctattctaaaatttttttctattaaaattttttataactttttttttttaaaggcaaggttgtgcatcccccagactggagtgcagtggcgcagtcatggcttactgcagcctcaaactcctgggcacaagcgaccctcccacttaagcattccaagtagttaggactccaggcatgccaccatgcccagctattttttaaaaatgtttctcgctatgttgcgcaggttggtcccaaactcctagccacaagtgttcttcccaccttggcctcccaaaggtattacaggcgtgagtcactgtacccaaccttttttaaaaacttgtaaagtttttttgctaaaaatggagatacacaaacattagcctaggcctacatggggtcaggatcatcaatgtcacactgtcttctacctctacaacttgtcccactggctggccttcatgggcagtaatgtgaatggagctgtcatttcccatgacaacaatgccttctggaaaatatcctgaaggacctgcctgaggctcttcttgaggagatgtcattccttttagaaatatatccatggtagatcacttggtttgttgctttatcatcatagatttgcttataagcagagaatacaccgtgaacattcctcaacattaatgaaaaccttttggtactggggtttgtgttttcagaagactttttaaggagcctgttgaggtctgtaaaagcttctgctaaacccttcagtgagaattttcttggggattctacttctgtttcttctcctgcagtttccttttctcttacctcttcttccggtatgcatttctgttccagttccaagaaagtcttattagtcaatttctcaggacaacattactaggcagtaagaatctttcagctccatgataaacttacgggaccactgtcatatatgcagtctgccatttactgaaccaccattatgtggcatacgacaaaaattattacattaagagaagaaaaaaatagaatcatataaaatggccaattaaaactataggcagaaaaagagtagaatacaataacagaaagacaagggcaaataatagaagacagtaacaaatagtagatatcagtcctgctgtatcaataattgctttaaagatcagtgatctgaactctaattaaaagacaaagattgtcagagtggattttttttttttttttttttgagacagtgtttggttattttgtttcccaggctggaatgcaatggcgcgatctcggctcactgcaacctcccctcccaggttcaagcaattctcctgcctcagcctcccaccttgctgggattacaggcatgcaccaccatgcctggctaattttatatttttagtagagatggggtttctccatgttgatcaggctggtctcgaactcccgacctcaggtgatccacctgccttggcctcccaaagtgctgggattataggcatgagccaccacgcctggcccagagtggatttaaacaaaaataaaactcaactacaagttgcctataagaacctcattttaaatataaaaacacagatagggatgctaacattgatcaacagaaagctggagtacctatattaatttcaaacaaagccaattttagagcaagaaaaattatcaaagataaagagggagtattacataatgaaaaaggatcagttctccaagatggcgtaacagcccttaatgtgtatttatgtgacaacagatttaaaacacataaggcaaaaaactgatagaactgcaaagtaaaacagacaaaaccactattacagctggagacttcaacactcttttataagtaattgacagatccatcaggcagaactcaataaaggcattgttgaactgaacaacacaatcaacagaatctaatttacatttatagaatacttcattcaacagcagcagaatatacattcttctcaagctcatgcaaaacattcaccaaggcagaccaaattctggaccataaaacacatcttagcaaatttaaatgataggatcatacagagtatgtttcagaccataatggaattaaattggaactcagtaacaaaatacttggaagttaaacagtacacttctaacacacatcaagaaatcccaagagaaatttaaaatattttaacaaagtgaaaatgaaaatacaacataaccaaatttgtaagtttcagtgaaagcagtgtaaagaaaatttatagcattgaatgtacacaatagaaaagaaaaaatatttaaatcagtaaatctaaacttccactttaggaaaccagaaaaagaagagtgaattaaatcataaatagaaggaacaaaataatttttaccaataattaataaataagataataaaaattctcaactcaaagtggattaaagaattaaatgtaaaatcccaaactataaaaaccctggaagacaacttaggcagtaccatcctcgacataggaatgggcaaagatttcatgacaaagacaccaaaagcagtcacaacaaaagcaaaaattgacaagtgggatctaactaaactaaagagcttctgcacagcaaaagaaactagaaggagtaaacagcctacggagtgggagaaaatatttgcaaactatgcatctgacaaaggtctaatatccagcatctataaggaacttaaacaaatttacaagagaaaacccattaaaaagtgagtaaaggacatgaatggacacttctcaaaagaagacatacatgtggccaacaagcatatgggggaaaaaaaacctcaacatcactgatcattagagaaatgcaaatcaaaaccacaattacataccatctcacaccagtcagaatagctattattaaaacgtcaaaaaataacagttgctggcgaggctgcagagaaaagggaaccctaatacactgttggtgggagtgtaaattagttcagccattgtggaaagcagtatggtgattcctcaaggggctaaaagcagaactgccattcaacccagtgatcccattactgggtgataaggtttggctctgtgtccccacccaaatctcaccttgaattgtaataatccccacgtgtcaagggcgggaccaggtggaggtaattgaatcatggggaccatttttcctgtgctgttctagtgatagtgagtgagttctcatgagatctgatggttttgtgagtgactggtatttcccctgctggcactcattctctctcctgctgccctgtgaagaggtgccttgcaccatgattgtaagtttcccgaggccatcccagccatgcagaactgtgagtcgattaaacctcttctcttcataaatttccgagtcctgggtgtttgttcttagcaacataagaacagactaatacacttggtatatgcctagaggaatataaatcattataccataaagacacatccatgtgaatgtttattgcagcactgttcacaatagcaaagacatggaatcaacctaaatgcccatcaacagtagactggacaaagaaaatgtacatatacaccatggaatactatgcagccataaaaatgaacaagatcatgtcttttgcaggaacatggttggagctggagcctattatgcttagcaaagtaacacaggaacagaaagccaaataccacatgttctcacttaaaagtgggagctaaatgataagaacttaagaacacaaagaaggagacagcagacactgaggtcaacttgaagagggagggtgggaggagggagaatagcagaaaagataactgttgggtactgggcctaatacctgagtggtgaaataatacatacaaaaaacccccatgacccatgtttacctatgtaacaaaccttcacatgtactctcaaacctaaaataaaggttaaaaagaaaaattaggcagaaattaatgaaatcgaaaacaggaaattagagaaaatcaacagaaaaaaaaagctggttctttgaacgattaataaaattgataaatgtggagccagattaagaaaaaaggaaaaaagacagaaattactaatatccacagtgaaagagtgaccattactactgatcccatagatactaaaaggataataaagtaatattttggaaaactctctgcccacaaattcattaacctagttgaaatagaccaattacgtgaaagacacactctaccaaaactcgcacaaggagaaacagataatctgaatagacctgcatttattaaagaaaatcagtaataacctttccaagcagaaagcactgctgggttcactggtaaattctaccaaacatttagggcagaaattatacctattttctgcaatctcatccagaaaatagaagcagaaggagtactctataatctttcccagaaaatagaaacttaaggaaacacttaagcactaagtgcaggagcaagacaaggaaggatgcccttttcaccactcacagattgtgagggatgaaataaagctgtccttatttgcagataacaaataactaattctatgagaccagtattaaaaatcaggcaaagacattataagaaagggaaacttaaggatcagtgcctctcatgaatgtagatacataaatagttaacaacatgttgacaaatcaaatctaacacatataaaaagaattatctaccctgaccaagtttaccattcaaaaaacaattaatgtaatccatcacaccaacaggctaaagaagaaaaatcaaatcttatgaatagatggaagaaaaggattcgacaaaatccaacacccattttttgatgttaaaaaaaaatagtcagcaaactagcaatagaagacacatcctcaacttgttaaagaacctctgcaaagaaacctgcagctgacatcatacttaatggtgagaaactagatgttttcccactgagagcaggagcaagacaaggaaggatgcccttttcaccactcacagattgtgagggatgaaataaagttgtccttatttgcagataacgtgattgtgtatgtagaaattccagagaatcaccaaaaaattcctgaacctaggatgtgattatagcaaggctgcagaatatgttaatatgtaatagtcagttacttatatactagcaatgaacaattagagaataaaaacaatgccatttacatttgcatcaaaaaaatcaaacaggtataatctaaaaatatatatatatataagatctacatgaagaaatgtacaaaattctgatgaagaaatcaaagaagagctaaacaggtattccacgttcatagataagaagactcaatgttattaagatgtcagttcttcccaacttgatttgtagattcagtgtaattccaatcaaaatgcctataagttatttcatggttatcaacaaactgattctaaagtttctgttgaaatgcaaaatacctacaatagccgactcaatactgaaagagaacaaagagaagtgacattatccaacttcaagaattatggtaagtaatcaaggcagtgatacaggaaaaagaatagccaaataggtcaatggaacaaaatatagaacaagaaattgacataaatatagtcaactgatctttgacaaagaagcaaaggatatttaatggaaaaataatcttttcaagaaattgtgctggaacacctgaacatctacataaaaaagaatgaatctagacacagatcttacaccaaaaagtaactcaaaatagatcatagacctaaatgtaaaatgtgaaactataaaactagaatataagatagaagagaatctagatgactttaagtttggcagtgaccaaaggcactatctgtgagagaaaaagtttacaagatgaactttgttaaaatttttaaattctgctctgtgaaagacactgttaagacaatgaagacaagccatggacatatcttgtaaagaacttgtactcagaatatactaagaacttttaaaactcagtaagaaaacagacaacccaattaaaaaattaataaaagctctgaacagacaactcattaaggagatgtacagatggcagataatcacattaaaagatgcttgacatcatgtgtcatcaggaattgcaaattgaaacagcaatgagataccactagacatctattagaatggctaacagtcaaaacacacaacaccaaatgtagggaaggatatggaagaacagaactatcattcattgctgatggaagtgcaaattggaacagccactttggaaggcacttcagcactttgttacaaaaatacacatattcttaccatatgatccagcaattgcactttttgatatttatccaaataattgttgaaagcatgcctatacaaacatgagcataaatgcttatagcagctttattcataattaccaaaaacttggaagtaaccgagatgtctccagtaggtgaatggataaacatactggtgcatattcatccacacaatagaatattactcagtgacaaaatgaaatgagctgtcaagccatgaaaaaacatagaggaaccttaaatgcatattgctaagtgaaagaaaccaatctaaaaaggctgcatgctgtataattctaactgacattctggaaaaggcaaaactatggaaatagtaaaaagatccatggggtttagagggagggagagatgaataggtggtggacagggtatgtttagagcagtgaaacttctgtatgatactgtaatggtggacacgtgtcattatgcatttgccaaaacccatagacctgtacaacacgaagagtgaacccaatgtaaactatgaactttactcaataaggtgtcaatattggctcaccagctgtaataaatgtatcacattaatgcaagatgttaatagggaaactgagataggtgagagggtatatgggaactctcagtatttctgcttcatttcttcataaacctaaagctactctaaaaattagtatattaattttttaaagaatgaaaaaacagggccagacatggtggctcacacctgtaatcccaacagtttgggaggctgaggcgggcggatcatttgaggtcaggagttcgagaccagcctggaaaacggtgaaaccccatctctactaaaaatacaaaaattagtcaggcgtggtgactcgcgcatataatctcagctactcaggaggctgagacaggagaattgcttgaacctgggaggcagaagttgcagtgagccgggatcgtgccactgtattccagcctgggcaatagagctagactccgtctcaaaataaaaataaagaaaaaataggagttcccagaggttgctgagaagattaactttggaaggagaaaatactatgaaaataaattaaggctgggcgtggtggttcacgcctgtaatcccagcactttggaaggccaaggcaatagatcacctgaggtcaggagttcgagaccggcctggccaacatggtgaaaccccgtctctactaaaatacaaaaattagctagggtgtggtggtaggtgcctgtagtcccagctactagggaggctgaggcgagagaattgcttgaacctgggaggtggaggttgcaatgagacgagatcatgccactgcaccccaacctagacaacagagtgagactctgcctcaaaaaaaagaacaaagtaagtaaattaatgttcattgtcagacactgctgtttttctttctcggttttgagcagctttattctggtccaagtaattatatttaatatttgagttttcaggttttgcctctataaatttgatatagctctctgtcttgctttataaaatagagagtaaaccaaagccttcaaaaggaaatttatataaattgaatcatatttttctctttatgaatagatttatttgtttccaataataagggcaagaaatgattattgtgggatatttgttttggttttgccttttttcttttctttttttttttttttttttttgagacagagtctcactctgtcacccaggctggagttcagtggcacgatctcggctcactgcaacctccgcttcccaggttcaagtgattctcctgccccagcctcccaagtagctgggattacaggcacctgccaccacgcccagctaatttttgtttttttagtagagacgtggtttcaccaggttggccaggctggtctcgaactcctgacctcaggtgatccacccgcttcagcctcccaaagtgctgggattacaggcatgagccaccatgcccggcctattgtgggatatttgaaaaaaatgctgagagatgtgatagataaagagactagaaactacccgttactgcactagcggagattaacctttttaaaaatgtattaagattttatatactggtaattttttccttatcagcacaccatcatatgtaagtcctttcttacatcattaaaaggcacagaagagacggtgggtatgcagtgcccagagcgaggccacctcccttagccagacaaggaccacacagggcccatcctacctggggctcaaggcagtgctgagacttttcaatgttattaattgttattttatttcactttagaagataaatgacatctcattttaatttgcattttttaaattaaagagattgaacactttttcaagcatttcatatgtcctttttggtggtttttctggccatgtcctttggccacttgactgttattctggtgtttttctaatccactcatgtaaatgctttataaatcaagactcgtgtccaagaggggacagtattcagtcctgggaagtggggtttggtgcatacctgacaatcttaaggtccttcacttttcttcttaaaaaaaaaaaaaacccttttcccaagggatgctatcaggtgttggtttgagtgcttgttgtgagacctgcagccttgttaggactgtctgctagcagctgggttcctctctctccatggtgggaagctggcctggcctttctagtgcatggattatggattggactggcttccttcttatcctaacccaacttttaaagaaagaagtaaaaatattctgtggccctgagagacagcaaataagaggaaaagggaagcacagttttgctgaatttattgctccaagttgactgtattattcccccacattatgcttgataggaggtaaataaacccttggaacttgtgtagttcacagtttgagggactctgctgagacaaggtttgaatcctaaacacttttttgaataatatcataagaaggttataaggctaatttaggaccaaaacttccaatgaaacagaagcaataaaattgttctcgcggtttctcctttgatggagagtgtgtaggccagcctgaagcataggggaaaataaatattgatgtcatccaaaaagaatttgctaactttttatattcaaataagtgaaaaagaaagtaaaattggttattttaacttacttttgaattttatttaaaaagtatccctgttactacaggatgatattttttgaaaacttattttaccaggaaaagcattcaaaaaatatataattgcaaaatgacaataaaatattttgaccctcttttaggcagtccctagccctcttctgcccctgtggccagcctaccaaggctgggcattgtctcctcttaggaactttctctaactacatctttagtttagaagactatcttccaaggcatgcttctaatctgaatgatttacagtattgccagtactacttaccaccctctgtggtcattttcttcttcgttttcttcttgtctttccccccattgcccctagataggtagtcagctttaagtcagggcctgttttatgaaactttgtgactgggacatagtaggtattcatgaaataactattaagtgagttaatggataatggaatttttctgattttactttattgaaaaaacagtggttttaattaacactcttgttttgagcgtctcactctgttgcctaggctggagtgcagtggcgcggtctcagctcactacaacctctacttctcaggttcatgcgattttcctgcctcagcctcccaagttgctgggaatacaggtgtctaccatcacacctggctaatttttgtatttttaatagaggtggggttttaccatgttgaccaggctggtcttgaactcctgacctcaagtggtccgccttcctcggcctcccaaaatgctgggattacaggcacgagccactgcgcccaaccaattaacactcttaaaagaacatactaccaacctgtctttgtactgaattatttacatgaattatcttattcaatcttcacaataatcctaacagttagaaattggagccatttttgttttacaggtgaggaaacttgctcatgtctataccaccagtaagatgctgagctggggctccagcctgggtctttctgactcagacacttgcttttcaccacaatagtgtatatatcttcccatgggaagggaaatacttttgaaacagtttaaaatatagtgaatagaagaacttttaaaacttactgtatttagtaggtgattttcctttatgttaatgctagcaacactcagaattaggcctgtggcaattcttgcacatttcacataaaagctcagaaatatagtagttttatcttatttttacagtaattatcaattattagaagaaaatatgggctgggcacagtgactcacacctggaatcccaacactttgggaggccaaggcaggtggatcacctgaggtcaggagttcaagaccagcctagccaacctggtgaaaccccatctctactaaaaatacaaaaaaattagctgagtttggtggtgcacacctgtagtctcagctattcgggaggctgaggtgggagaattgcttgaactcgggaggctgaggtgggagaattgcttgaacccgggaggctgaggctgcagtgagccgagattgcgccactgcactccagcttgggcgacagaatgagactccatctcagaaaaataaatatgtttatactatacttacctaatccacatgcatacacatacttctatctgatctttactgaaagtcccccaggcacattctggaaaccccagtcaaatcagttaaacacatgcacttgctgtctctcctgatcaaatgaaggtctacaaagtctcaagaagaaactacagcaaagttaattaaggaagaagatttctgtaagcaacgtcgtcttaactgtcattttctttttttttttttttaatctttgtctaacatccccatgtacaccagagattaactttcattttctaatgactaagattgtgaaagagaaaattctgggctgggtgggtggttgccaaccatttgttactttatgggtacctggatgagggttgtggtgaatgtaaccagaggcaaatccgaggagaccctgtgaatgcccagagttgcgtgagtgactggagagtgataagggatcagagcagagatttctgaagggggaaagctgacgttaaagaagacttaccgctcccttggaatacctgtcccactggtttctaattcagattccacacagtagctaaggattttttttaaaaaaagtaaatcaaagcacttcccctgcttgaaaatctttcagttaatgtatacacctggagctgatgagaggcatccaagtgcagagatttttaattaaactttttattttgaggtaattgtagattcgcatgcagttgtgaaaagtaatacagaaagatcctatgtatcctttacccagtttccactaagggtaatatcttgcagaactgtcatacaatgtaaaaaccagatcttgttatgaatgtagtcaagatataatagtttcaacaccaaaggatccttcctgccactcttcataggcatactattttcttccaccctgtcaccctccagaacccctagcaattgctagtctactttatgttcttattattttgcatttcaataatgctatggaaatggaatcatatagtttgtaaccttttgaaattggcttttttcacttgggataattttctggagattcatcccagttgttgcatgtataagtagttactttttactgcagagtggacgtccctggcatgggggtatatcagtttgtttaactattcacccatggaaggacgtccaacttttatgaatagtgctggtatgaacatttgtctacaggtttttgtgtgaaggtaagttttcacttttctgggataaatacccaagagtgcaattgctgagtcctattgttgttgcatgtttagttgtttaagaaactgccaaactggtttttagagtggctatttcattttacattgccacgagtaatgtgtgagtgatccagtttctccataccagcatttgatgttgtcactatttttaaatttttattctgatagatagatagtgatatctcattgtggttttaatgtgcatttccctaatgcttgtcaactgaagaatcatgaggttcaaaaatttggaaaggagagctttatttctcataaagggtggcacactgctggctgggaaatgcagcctttggcaaaagctgagaacaagcaatttaagagaggaaagcctaacacaggtatttatgcccaatgggttggctaagtatacatattcaaatttagctatagaaggagtcatgaagatttatgaaaaaagcacaactgagcttcatgcctcttcataggtcacatgttaaaaaaatgatggcattagcatgatccaggggtggaatttttggccctctggcatcaaaaggtgaaacagaggacctgaaaaccctcatagcacatcctctgctagtcagttagaactggtccagagatatggtggtcagtttttaggaagggatgcattgtcaagctggtgggctgtcacatcaaaacttcaaagagggagagggagcctggttttggcctcagataattggctgaaggcgataaaggaatgaatcatctgtttcttgttttctggagttggtttccgcttactccttagggaagaattctggttaaaggttaataaggaaggagcatactgaggcgtaaccaacctcttatcctgtcatggcccaggactttgttttttagggtttctctgtggtccctttggccaagagggttctgttcagttggttgggaggcttagggttttatttttattttgcatgctaatggcatcaagcatcttttcatgtgctcatttgccatttatttattctcttcagtgaaatatgtgttcttgttttttgctcattttctaattggattgtttgctattttattgtgaaattttgagggttcttaatatattctggatactagtccttaattgcaatctctggcttatatttttcatatcttctcaacaaggtctaccagaataagttttaattttaatgaaattcaaattaccaatttttccttttatgaattgtgtttttgatgtcacgtctaagaactcttcacgtagctgtaaatccaaaagattttctcctgtgtcattttgtatttaactctatgatctattttgagttacttttcatataaggtgtgagacttaggtggaaggttttggtttttctgttttttgcctgtgggtgtccaatttctccaccatttgttgaaaaggacttcttcccttcaatgaattgctttttgcacctttgtcaaaaatcacatagatctatttctgggtgttctgttccgttgatcgttgtgtgtgtttctttgtaccatcacacagtcatgactacagaagctgtatgtcttgaaatcacgttcatagcactgtattctttttcaaaattgttttagctgttctagttcctttgctttgtcatataaattttagagtaattttatctccacaaaaaaatcttctggaacttcagtaggaattgtgttaaatgtatattattttggaaagaattgaactactaattatatgacataatgaagtctttcagttcatgaacacagtatgactcttcatttgtatgattcttcttttatttctttcattagcattttgtagctttagcatacagctcttacaggtattttgttagatttacaccaaagtctttctttttatcttttctttctttctttctttctttctttctttctttctttctttctttcttttttttttttttttgttgaaacggagtctcactgtctcgcccaggctggagtgcagtggtgcgatctcagctcactgcaacctctgcctcctgggttcaagcgatttccagccaatttttgtatttttagtagagatggggtttcactatattggccaggctggtttcgaattcctgacctaagtgattcgccctctttggcctcccaaagtgctaggattacaggtgtgagccactgtgcccggcctttttttctttctttttctaaaattataaaaagtgttgttttttaaaattttggtgtccatgtattctagtttgctagtatattgaaatataattgatttttgtgtgttgatttttgtgccctgcagttttgctgaactcatttattagttttagaagttttttgtagattctttcataacttctccataggcaatcatgtcatctgtaaataggtttagtttaattcttgttctctgatctgtatgccctttctttccttttcttgccttattgcactggctagaacttccggtactacactgaatagcagaagtgagaatagacattctggcttgttcctaatcttagaggaaagttttcagtctttccccaataaatataatattaactataggttttttatagatgttctctaccaaattgaggaaatttccctcaatttctagttttctgagaagttttaacatgagagggtgtttatttttgtcaagtggtttttctgtactgatttatgtgatcatatgattttttctttataatttaatgtggtagattacatagattgattttcaaatgttgaactagccttgcatccctggaataaactcatctttgttatgatgtatatatattttttacatattactgaattttatttgctaaggatttttacatctatattcataaagcatattggcctatagtttttgtactgttttgttttgataccagcgtaattctaggttcataaaatggattgggaagtattccctcctcttctatttcgtgaaaaagattatggagaattgatactaattgtttcttaagtgtttggtagaattcaataatgaaggtgtctgagcctggagatacctgtttgggaaattttgaaatcacaataccaatttacttagtagtcatagggctattcaaataatcagttttatattgggtgacttgtggtagtttgtattttttcaaggaactggtttattttacctaacatgtcaaattttgtgtgcagacttgtccatagtattcccttgttatccttttgatgtctacatggtctatagtgatattccctttttcactccagatattggtaattcacatgttctctgtttctttgtcagtcttgctagacatttgtcaatcttactgatcttatccatgaaccagatttgtttcatgaattttcttcattttttattttcagcttcattgatttctgctctaatctattatttccttttctcagcttgctgtgggtttattttgctcttgttttcctaagttcctggagaggtagcctagattgttgatttgaaccttttctcgtatacacatctttttaaatttatttttattaattatgccacattatttttaattatgtacaaagatctaatttgtcaccaagagaccatgtcacctactgctgtgtttggctgccagtctcttgtctccgtcttcagcaatggtgaggcgtatacgtttcctcagggaagagaaattaatggtttgttgcccttgccagtaacaaaaacgttggaaagccaggtggcaaagctgttccattggcatctttcacgtgaaccacatcaaaagatcaagggtgcctctctctgtgggtaatgacaccagttcttcccaagttagcacctccagtcaccatccacaggttaccagtgtcaaacttgatgaaatcagtgatcttgccagtttccaaatcaatctgaatgggatcattcaccttgatggaggggatcagggtagcagatgatgcgagcatcatgagtcaccagatgagggattccttttgtgcccacgaagatttttctcactttgcacaacttgtacttgggctcctcaggtgtaacacgatgtacagcaaagcaacccttggtgtcatagatgagacgaaaattctctcccatctagtcaatgcccatgacatctatgaatccagcagggtgggttatatcagttcgaacgttgccatcaatcttaatgaaccactgcatgcaaatcttctctttttttgtatatttttaatttatttatttatttttgagatggagtctcgctctgtcgccaggctggaatgcagtggcatgatcttggctcactgcaacctccgcctcctgggtttaagcaattctcctggctcagcctcggcctcctgggtaggctgggattacaggtgcccaccaccacgcccagctaatttttgtatttttggtagagacacagtttcaccatgttggctaggatggtcttgatctcttgacctcgtgatccgcccgcctcagcctcccaaagtactgggattacaggcatgagctgccacggtgggccacaaatcttctttatttcacctcctgtcaaggcatacttaagtctgttccttaggaaaatgatgacggggagacactctctcaacttgtggggactgggggatggacgatgaacaaacacactggacaatttatccagcatccagtgatttggagctgctacccactttagatgcttcttgggaccaccagccatggctgcattaggcacggaaagagctcatatatgcatttagccctataaaattccctctcagcactgctttcgcttcatcccaccaattttgatatgtaatcttttcattttcattcagtttaatgtatttttttttaatttcctgagacttcctgtttgactcatagatattttggagtgtgttgtttagtttccaagtgtttggaaatgtttctgtcatttttctattgttaattagaagataagaaaaagtagcttttgccttaaactaaaactcaataatttatatgataaagtatgaattcgtggtacatgaattatacagacgaagtgaattgataattacatatgcagtgattaagtctgctatgcacattaacacaaagaagggaagaaaatagaataaatagatgatatcttaagctttttaagtaaaaattggctgaatgtggtggctcacgcctgtaatcccatcactttgggaggccgaggctggtggatcacctgaggtcaggagttcgagaccagcctggccaacatggtgaaaccctgtctctactaaaaatacaaaaattagctaggtgtggtgacgggtgcctctaatcccagctactcgggaggctgaggcaggagaatcacttgaacctgggaggctgaagttgcagtcagctgcgattgcaccactgcactccggcctgggcaacagagcggaacttcatctcaaaaaacagaacaaaagggaaaaagtaagaatgatgaaaggactaatgaaaaatcattttaggagacaactggaaatattctttcttgtgtgtttgaatatcctcattcctctttgtgtttatttatttatttttattatactttaagttctagggtacatgtgcacaacgtgcaggtttgttatatatgtatacatgtgccatgttgctgtgctgcacccattaattcatcatttacattaggtatatctcctaatgctatccctcccttctccccctaccccatgacatgtcccagtgtgtgatgttccccaccctgtgtgtaagtgttctcatggttcacttcccacctataagtgagaacatgcggtgtttggttttctgtccttgtgatagtttgctcagaatgatggtttccagcttcatccatgtccctaacaaaggacatgaactcatcctttcttatggctgcatagtattccatggtgtatatgtgccaattttcttaatccagtctatcattgatggacatttgggttggttccaagtctttgctattgtgaatattgctgcaataaacatatgtgtgcatgtgtctttatagcagcatgatttataatcctttgggtatatacccagtaatgggctcgttgggtcaaatggtatttctagttctagatcctagaggagtcgtcacactctcttccacaatagttgaactagtttacagtcccaccaacagtgtaaaagtgttcctatttctgcacatcctgtccagcacctgttgtttcctgactttttaatgattgccattctaactggtgtgagatactatctcattgtggttttgatttgcatttctctgatggccagtgatgatgagcatgttttcatatgtctgttggctgcataaatgtcttcccttgagaagtgtctgttcatatccttcacccactttttgatggggttgttttttcttgtaaatttgtttgagttctttgtagattctggatattagccctttttcagatgagtagattgcaaaaatgttctcctattctgtaggttgcctgttcactctgatggtagtttcttttgccgtgcagaagctctttagtttaattagaccccatttgtcaattttggctttcgttgccattgctttgggtgttttagtcatggagtccttgcccatgcctatgtcctgaatggtattgcctaggttttcttctagggtttttatggttttaggtctaacatttaagtctttaatccatcttgaattaatttttgtataaggtgtaaagaagggatccagtttcagctttctacatatggctagccagttttcccagcaccatttattaaatagggaatcctttccccatttcttgtttttgtcagatttgtcaaagatcaggtggttgtagatgtgtggtattatttctgagggctctgttctattccattggtctgtatctctgttttggtaccagtaccatcctgtttttgttactgtagccttgtagtatagtttaaagtcaagtagtgtgatacctccagctttggtgattttgcttaggattgtctttgctatgcaggctcctttttggttccatatgaactttaaagtagttttttccaattctgtgaagaaagtcattggtagcttgatgcggatggcattgaatctataaattaccttgggcagtatggccattttcacgatattgattcttcctatccatgagcatggaatgttcttccatttgtttgtgtcctcttttatttcattgagtagtggtttgtagttctccctgaagaggtccttcacatccctagtaagttggattcctaggttttttattctctttgaagcagttgtgaatggcagttcactcatgatttggctctccctttgtctgttattggtgtatataggaatgcttgtgatttttgcacattgattttgtatcctgagactttgctgcagttgcttatcagcttaaggatctttggggctgagacaatggggttttctaaatatacaatcatggcatctgcaaacaggaacaatttgacttcctcatttcctaattgaataccctttatttctttctctttcctgattgccctggccagaacttccaacactatattgaatagaagtcgtgaaggagggcatccctgtcttgtgccggttttcaaaaggaatgcttccagcttttgcccattcagtatgatattggctgtgggtttgtcataaatagctcttattattttgagatatgttccatcagtacctaatttattgagagtttttagcatgaagcgttgttgaattttgtcaaaggccttttctgcatctattgagataatcatgtggtttttgtctttggttttgtttaatgtgatggattacatttattgatttgcgtatgttgaaccagccttgcatcccagggatgaagccaacttgctcgtggtggataagctttttgatgtgctgctggatttggtttgccagtattttattgaggattttcacatggatgttcatcagggatattggtctaaaattctccttttttgttgtgtctctgccaggctttggtatcaggatgatgctggcctcataatatgagttagggaggattccctctttttctattgatgtgaatagtttcagaaccaatggtaccagctcctctttgttcctctggtggaatttggctgtgaatccatctggtcctgaactttttttggttggtagactattaattattgcctcaatttcagagcctgttatcagtctattgagagattcaacttcttcctggtttagtcttgggagggtgtatgtgtccaggaatgtatccatttcttctagattttctagtttatttgtgtagaggtgtttatagtattctctgatgatagtttgtatttctgtgggatcggtggtgatatcctttttattattttttattacgtctatctgattcttctctcttttcttctttatcagtcttgctagcggtctatcaattttgtcgatcatttcaaaaaaccagctcctggattcattaattttttgaagggttttttgtgtctctatctccttcagttctgctcagatcttagttatttcttgccttctgctagcttttgaatttttttgctcttgcttctctagttcttttaattgtgatgttagggtgtcaattttagaactttcctgctttcttttatgggcatttaatgctgtaagtttccctctacacactgctttgaatgtgtcccagagattctgttaggttgtgcctttgttctcattggtttcagagaacatctttatttctgccttcatttcgttatgtacccagtagtcattcaggagcaggttgttcagttcccatgtagtagagtggttttgagtgagtttcttaatcctgagttctagtttgattgcactgtggtctgagagacagtttgttacaatttttgttcttttacatttgctgaggagtgctttacttccaactatgtggtcaattttggaataagtgcgatgtggtgctgagaagaatatataatctgttgattttgggtggagagttctgtagatgtctattaggtctgctaggtgcagagctgagttcaagacctggatatccttgtttactttctgtcacgttgatctgtctaatatttacagtggggtgttaaagtctcccattattattgtgtgggagtctaagtctctttataggtctctaagtacttcctttatgaatctgggtgctcctgtattgggtgcatatatatttaagatagttagctcttcttgttgaattgatccctttaccattatgtaatggccttctttgtctcttttgatctttgttgttttattagagactaggattgcaacccctgctttttttttgttttccatttgcttggtagatcttcctccatccctttgttttgagcctatttgtgtctctgcatgtgagatgggtctcctgaacacagcacactgatgtgtcttgactctttatccaatttgccagtctgtgtcttttaattggagcatttagcccatttacatttaaggttaatattgttatgtatgaatttggtgctgtcattttgatgttagctggttattttgctcattagttgatgcagtttcttcctagcattgatggtctttacaatttggcatgtttttgcagtggctggtaccagttgttcctttccatgtttagtgcttccttcaggagctcttgcatggcaggcctggtggtgacaaaaatctctcaacatttgtttgtctgtaaaggattttgtttctccttcatttatgaagcttagtttggctgggtatgaaattctgggttgaaaattcttttctttaagaatgttgaatatcggcccccactctcttctggcttgtggagtgtctgccaagagatccgctgttagtctgatgggcttccctttgtgggtaactcgacctttctctctggctgcccttaacattttttcttccatttcaaccttggtgaatctgacaattatgtgtcttggggttgctcttctcgaggagtgtctttgtggcattctctgtatttcctgaatttgaatgttggggaagttctcctggataatatcctgaagagtgttttccaacttggttccattctccccgtcactttcaggtacaccaatcagacatagatttggtcttttcacatagtcccatattttttggaggcattgttcgtttctttttactcttttttctctaaacttctcttcttgcttcatttcattcatttggtcttcaatcactgataccctttcttccagttgattgaatcagcttctgaagcttgtgtgtgcatcacgtagttctcatgccatggttttcagctccatcagatcatgtaaggtcttctctacactctttattctagttagccattcgtctaatcttttttcaagttttttagcttctttgcgatgggttcgaacatcctcctttagctcggagaagtttgttgttacgatcatctgaagccttcttctctcagtttgtcaaagtcattctctgtccagctttgctctgttgctggcaaggaactgtcttcctttggaggagaagaggcactctgatttttagaattttcagctattctgctttggtttctccccatctttgtggttttaactactttggtctttgatgatggtgatgtaccgatggggttttggtgtggatgtccttcctgtttgtttgttttccttccaacaatcaggaccctcagctgcaggtctgttggagtttgctggaggtccactccagaccctatttgccttggtatcatcagcagaggctgcagaacagcaaatactgcagaacggcaaatgttgctgcctgatccttcctctcagatcttcgtctcagtggggcacctggctatatgaggtttcagtctgcccctactgggaggtgtctcccagttaggctactcgagggtcagggacccacttgaggaggcagtctgtccgttctcagatctcaaactccgtgctgggagaaccactactctcttcaaagctgtcagacaggtacgtttaagtctgcagaaattggctgctgccttttgttcagctatgccctgcccccagaggtggaatctgcataagcaggcaggcctccttgagctgtgataggctccacccagtttgaacttcccggcactttgtttacctactcaagcctcagcaatggcagacgtccctcccccagcctcgctgtcgccttgcagttcgatctcagactgctgtgctagcattgagctaggctccgtgggcatggaaccctctgagccatgcgcgggatataatctcctggtgtgccatttgctaagaccatttggaaaagtgcagtattagggtggtagtgtcccgattttctaggtactgtctgtcacggcttcccttcctaggaaagggaattccccgaccccttgcgcttcccgggtgaggcagtgccccaccctgcttcggctcacactttgtgggctgcacccactgtccgacaagccccagtgatatgaaccctgtaactcagttggaaatgcagaaatcacctgtcttctgcgtcattcacgcttggagctgtagactggagctgttcctattcagccatcttggaacctcctctcttctttgtgtttaaatacatattgcacagttaaattttcaaaagcaggtggcctgtaagtttgatcatttggaaataccagacttttatgcttccagttcttggtctagaaattaatagcaaattttttttcctaaatcttagtcttgatctaacctagagtacttatgagtaaacaagtggtataaagtggtataatctgttcctttctattctgtcttctgtctctgttttgctagccttcctcccactctgtacttatgatcattatttgactttcccaaagggtagattttagaagctgtatatggactcctagaaataaagcaattagaatatgttagaaatgaatccagccatgccactttatttctataaaataacaattccaagataagaatgactttctcaaagaattgagaaatattcattccagtatgtatctcttggtgcctaggatgtgcctagtacttgttgcatactgtagagattcaataaatagaagagtcaactccagtcccttgcatcactaaaatctcactggggaaatagacacgttctacagaagaaactgggagatagatacttgtgtataataatataatctagtaacttttaatttggttcctcaaaaattgagcaatagaagcagtaattttttaaaaatctatagtgttaacagctgaagtgtaatggaactcatgttccttcctgtgtatattccattttgatggaggtgctaatagttggagctaggagtggggtatgtgtattctttgcactgtatgatgtggcttctttgtgaagggagacctgtgattttctgaatacatggcctgtatcctctcaatggccagtgagacattctcgaggggatgggtatcaagccactctgtgaatgtgagttcttactccatctggtagaaatcacagtagcatggaaataataccacactgtaatttccagcaaagaaattttggacagttatcagagccttactttttcattcatcaagtcagaatgttgacagtagtctgtctgtctgacagggttgttatgggaactaaataaaataatagaagcaaaaactcttagttttctaagattttaaagatgttataggtatgttaatgagtttttatatgaccctacacagatgcccaatttctgatgctccctgaaggccataccaactcctgttacattgtctattgtcagccagggacgattttccatctctgctaggccaaagagaagccagccaatgagaattagcctgtaggcctagcagtctcaagcatagaaccacaactgagatctgaagatagctggctgatcttagatggcctcagtggggctggctggctggatgtgcaatttttgttcactggcttagcttccctaatgattgttccatactgaatctcagcctgcctccacctcttccttccattcattggcttcattctactctagagacactgggtttaatctggggctctacctgcaaagtaagcattgcttccaagccagaactgttttagccctaggtacttgggcttacttgaggaatgaaatcctttggttagccagcaacctataatgcctaaactacatgttgtaatttaaatctacaggtggatatttaggagtagaagttgtcacaggtcatgggatgaggagtaaagcttagtaagtttattttcttattttgtttttgttttttatagagatggggtcttgctttgttttgcccagagtggagcatagtggcacaatcacggcttactgcagcctcacactcctgggctgatgtgatccttccacctcagcctcctgagtagctgggactacaggtacatgacactcccattcccagataattttttaaatttttgatagagaaggggtgttgctatgttgtctaggctggtcttgaactcctggcctcaagcagccctcccacttcggcctcccaaaatgctgagattccaggcatgaaccaccgcgcccagccagcatagtaaatataaattaaggtgtttttatgtccccactttgctactttttgctttctgatttcaaaggacacacccttaagtatgaacaggttgtttcccaaaagttctttgcttagaacttagactgcattttcccagagagcagcagtggaaatcatagctgcattcccaggccagcccccaaaagtctgttttatactaatgcattataacattttactgataatgagacttcggctcctcatagccacatttataatattatttctctgagaaaaataattttgagtcaagttcagatactgtggaagtatgcctccatgaagtggagagaaggagaagatggaaaaaagggggtgacctttgggtagtcaatgcggcaggcgtatctgaataaattagaaaaatattcctgaaccctaggaacctacgtcttgatgctgtcttagagaaggcgcctgtccaggccagttgctgcacctctgttctgaactgataacaagaagggcagttgcagggagattatgagcgtcatatggcaaagtctttcatgctaatctgtgtacctttttggttatgtcctaaactgtttgcaagtcagaaactgattatataatatttggtgtatgtatttcttatttttaaaaaacatgctaagctatgtcattgttactgtattaaagtgtgaataacctggagggcaaaaacaggtgttggctgaacccttcctacacagcctgaagaccacactatggttggctatctcttaaatacttaaataatgttgttggccaacattatgtataagtagactcatctcatttctaagttcatgaacctttggtatatcactaaagacaattaagaccttttgagatacgcacaagacttttgtgctctttaatttatttaaggaagacagttttctactttaatgcttctgtgtagaaatgggctttactgttattcacaatagcagcgacctggaatcagcctgggtgccctatagcagtggactagattaaaaaaaatgtggtacatacacaccatggaatactttgcagccataaaaaatgaaatcgatggcctttgcaggaacatggatgcagctggaggccattattctaagtgaattaacgcagaaacacaaccaaacaccacatttaatcacttgttagtagaagctaactactgggtacacatgtacataaagataggaataatggacactggaaaccccaaaagaggggagggagggagcagggcaaggttgaaaaactacttacttggtactatgttcactgttgaggtgacagcatcagtagaagcccaaacatcagcatcatgcaatgtgctcatttaacaaacctgcatgtgtatcccttaaatctaaaataaaataaagaatctaaaataaaataaaatttgttttaaaaaagaaaacagccaggttgggtacactgttatatagtagttctaatgtatttttttaaacagagctcttttcttgagctttgataggaatatttatatcatataaatataaatcatatatcttgagtctttttgtagctccgattgaacacaaattatttgcccccaaagaggataggttctgcagtgttccagcaagatgccagtagataatgggtaagttaaggttacactcagcatttgtgaatggtgattgtcttcacaaaccctggataagtatctagcttcaccttttttttttgtttctttgtttttttgagaaggagtctcgctctgtcgcccaggctggactgcagtggcacgatctcagctcagtgcaagctccgcctcctgggttcacaccattctcctgcctcagcctcccaagtagctcggactacaggcgcccaccaccacgcccagctaatttttttgtatttttagtagagacagggtttcactgtgttagccgggatgagtgtcgatctgacctcgtgatccacccgcccttggcctcccaaagtgctgagattacaggcgtgagccaccgcaccagcccagcttcaccgttttttaaatgtaagtttgaattccaaattaaccatgtaacaagccagtgaaataaggcagtgatggatcttgtgctgtatctggcccttatctgtagattttaacatcctttgtggttgctggttttagtcttcgaagaatgtttgctcttgtttcatttctctagtttgtcactagttcattttggagtgttcctttaaacagtcaactgtataatataaaaggaaaataaaaacactttagttatacagaggttaaaaaactcacttgcataaatagtggacattttaaagtaatatactaacaattggaataataacaattcagtactgaacaaatgtgttacatttaaccatccataagtatataccagtgtgccctctgactaaagctgctgtaccctgcctggctgttactgtcttccttacatatgtgtgttccattggaaacagaaggtttgcacagtccagttgaccagattggaacacacaagtgtcccccttcctcagcctctgaccccctcccctgtgagctggtcatccagttacccaggcctttgcttgcctgtctgcaagttccatggcagcataaagaaacaattgtatgttcgtctttgtaggggtgatcctgataattcgtggggccttttttaaatgcaagtgttgttgagaagacaggagtctcaggtatggcttgacccagaagtgtcccctatgcctgttggagtgggtttaaagatgagaacaaggggcagtagcatgtggtaccatgttccttgcttcctttgtgaagaacatgaagtgaaataaattatgaaataattggtaggaaagactctatgtgattgcatcttgtatcttccattacccaaatccaagttttctctttctgagcaggttgactttaacaaacacaaacagaaactgattgttggtctcgcttttaagtaatttgtgaaagacgacctgctgataagaataacattaacataatgttatctgtttaaagtgaaattcttattccctttgggaaaacagacatagataccctaaaatggtaaaatttccttgcttatgttgataggccacacctgacaggtgtgcttacattgacaagccatacatcttatcaaaagtggtcattttgttggctgaactaaagagcatttcatcattttccctgatattaactctttgactatgagatgcaactgtcagtgtgaaacttggcatttgcccagctcttctgataggaatggctgttctctcaccttgtgggatatttttacaatcttgactctcttttccaatatcactttcacatatagtgctggtaggccaagggaagacttctcctctccactgtacagattcttgggcccagcatcttttctggaatccccaaactagtccctcaccagctccatccttgtgtctttgagtactgggtagcctggtgtgcccttttcccttcgtcccgcctgcagctgtcctcttgcagctggctgttgcttcaagtcctcagttccctgaaaagccttccagtttctgcttataagttcagactgtagaagcactccaccagaatctcctgggtttgctcaggtacaaaagttccagaaacccagtgtgactgcttttacatgttcccacagaattacatgttcattgtgcctgtctggctgatgatgattttttcttcttttactttttttatttttctaagttatctataatggccatttatgactttcataatcagaaaatacttcttttgccttgctgttctcctatccttcctttatatggatcgtagggtgatctagccatttttaagtccatagagactcccacattttgccactttaagagttagcatctgtgtgtattttcctccaaagacatacacaattcactttaaatggtcccttctgtgctctgctgcacaatgaaactgtttcattcttcggtgaccccagggcctcctttctgggtgtagcgttagattacctaaagcagaggtagttcacacctagcttcttcattccagtttgccaggttgtcagcttcctcagcttcaaacttgtggtaataatagcatctccttcacagagccaccaggatgctccactggataaagcagcagagtgcctggcacaatgcctgccatcgaacatgagtggcctaacatttttgctgttgttttaatgacttaatgacttcctccatggcgcatatgttcaagtgagacccaggttgtactgccagagtctatgaagtatcatgtctgtgtggcagcatagcaggtagaaaagtatttctcaattagagtattgtatttcttttggagtttccacctggagtctccaagcagaactgatttaacatttaatcccaaacctgttcagtaccttgctcatttgcttcttcctctgaactgtgtccccttaagccaggcttcaggacgcctccctcaaccacttgaagaagctgccagcagcctctctacactgtgtccagatttcacatacttttctcagcccgctgcagttgatctttagctgctacttctctgctgagattggctgctcagcagtcagtctctgatcaactgacttttaaatccattggctttttccagcttgcatcctttttgcctcctctgtacctttgccatttctgacttgctagtctagctgcagtgcccacccctgcccctcctgggatcctcccccatctccctctggcagctttctcaccctcttccctgggtcccttgtaccatctctcccactagctgcccttcttatgcccatcctatacgtaagggttactatgggtcgacatatagccttgtataacatgtacggtaactgacacattatatctcgtacactgatacaaagaagtggttttgaaataatactgagaagtggaatactgaattttgtttgtaaagcatgactacaaaccacaaaatatgttcaaagaaagaggtgagggaattacacaagtgttcggctgtctgccttgtgattttttcctccttttccaatctttccaagtttttataatgttcacttcttttataaccagaaaaagatttgtttctcttgtctcttttatgcttcctttatatgtatcttagagtgatcacatccacttataataatttcacctagttaacagctatagccctaggcgtgattttcttctcctcttgccatttggcattatataatgtagatttccccattccttggatggtatttgtgaccatcttattgatgtcataacatttcattggtttaaaaaggtatctaattttaaatagtttttgttgattttaatattacctgtgtaacagttggtcagtggtggaggttgtgaattctcagttttgaggctgaggacatcagagtccttggtttccttcaggggtgaaatgagaacaatggacatgctctggggcaccggacagggcattgtctgaagggcttgcctggtctttgtgaaaggatttctctctcctctgcaccctcggcccccatggaggcaaggttcactggtaggaccaaacacacagggcgctccacctcaaagtcagcggagaaaagctgagagatgtcattgtcacctgaggtgactgcctttgctgacgctgttgctgctgggtgtcagaaggctgaagactgcgcgcagtccagaatcagctgcccttgtggttgccgctgtttcattttggcagcaaaggacttagctttccccatttgtgaatgtgtatagatttgtttaaagttatagggtgtgggaagaagggaagagaacagggaagagacttattcctactcctgtgccactgtcccacccttcatccccgccaaacttcacccctccagcttctcttactcatccagcctgaatgcacgttcagtctagcctttatctctctcttgagaaagttgctgaatgaaggctagaaagaatttcttaactctgttttgatgtatgacaattttttttggcaaatatgcttcccagtatttagaatcactgggctaattagaaacagtactttactcttttctcttttttttttttttttgtcaatgaaggaaagaaataaggtagtcttcatcaaggactactacatgttttgttcattaaattctcactaaagcccactgagggagtgagggaggcagctcagatcacacaggccctctttttttcttttttgaaacatggtcacaccctgtcgcctaggctgaagtgcagtggccccgtcagggctcactgcagcctcgaactcctaggctcaagcgatcctcctgcctcggctcaccaagtagctgagattaccagcgtgcaccatgacacctgactcatttttcttttttttttagtagagatggggtctccctatgttgcacaggctgatctcaaattccaggattcaagctattcttcgcctcagcctcccaaaatgttgggattatacaggtgtgagccatcgcacctggccccacatgggccctcttgaaacccaaatctgtgggattccaaatcccatgttctccacttggccacatcacttgtcactgtgcctcaggttgtcatgtaccattgtgcccctatcgactgtcacatgcgaggataagcctggctaggtgctagtggttaagaaaataagacttagaatctgcaagggtccagatcgttggcatgctatcagcttggtaagaatactcctaaagatggaactgctcattgtctctaaggtgatctaaattttattctaattctgggagaaactgggcaagttttcagaagtttttaagtcaggtatttgagttataggacatctgtgtgggattaatacctatgaataattttttagttgctcttgttggaagtaagagagaggaaatgtctatttaacacaatatctgaccagtctttcagctacttgattactttcctgttcagtctgaggttaaatgtcttttgatgtagtaaaacttataaagtgtgaagaagaacttaaatccctttccttatacttagccattatttagtccctttgggaaatcatatttaaatatttgcttcttttttcttttctttttttttttttttttttttttttgaggcggagtctcgctctgtcaccaggctggagtgcagtggcannnnnnnnnnnnnnnnnnnnnnnnnnnnnnnnnnnnnnnnnnnnnnnnnnnnnnnnnnnnnnnnnnnnnnnnnnnnnnnnnnnnnnnnnnnnnnnnnnnnnnnnnnnnnnnnnnnnnnnnnnnnnnnnnnnnnnnnnnnnnnnnnnnnnnnnnnnnnnnnnnnnnnnnnnnnnnnnnnnnnnnnnnnnnnnttttacagaatttagtagttaggctgggtgcggtggctcacgcctgtaatcccaacactttgggaggccaaagcgggtggatcacctgaggttgggagttcaagaccagcccagctaacatggtgaaaccctgtctctactaccaattaaaaaattagctgggtgtggtggcacatgcctgtagttccagctattcaggaggctgaggcaggagaatctcttgaactcgggaggcagaagttgcagtgagcagagatcacaccactgcactccattctgggcatcagagcaagattccgtctccaaaaagaaaaaaaaaaaaaaagaattcagtagttaaggaaattttcatcattcattattacactgcgcttttctttaaaagtagactagttttaaaaataaaatagtttgatatatataatacatcatttcatcatttttcagataaacctactaaaaatatttccttgttcaacttgagcttattattttgcagttccttattgcaagaagtatcaagcaaaactgggcacagatttattttattttaggcttattgcctttgtgtaaaagaaattcattgacggccaggcacactcgctcatgcctgtaatgccagcactttgggaggctgaggcgggcagatcacctgaggtcagtagttcaagaccagcctgaccaacatggagaaaccccatctttactaaaaatacaaaattagctgggtgtggtggcacatgcctgtaatcccagctgcttgggaggccgaggcagaagaatagcttgaacctgggaggcagaggttgcggtgaaccaagatcacgccattgcactccagcctggacaagaagggtgaaattccgtctcaaaaagaaagaggagaagagagaagagagagaaattgaagaaggctgacttcctgtttgggggacatgcatgcattgggcagtaaagagaagcaacattgagttagagtacagagtgatgtttacactgagttctaaagtatatctaaggaaattctttttattttaacattttaaaagtgaaaataaagaaccttgtaccattctaggcttttagaaacattttaaataagtttaaatattaccattaaaattttatttctgtggaattcttacagatatgatacagaaaaaaatagtttataccttttaaaaatgtaaaatatccctaattatcccactattatatttaatacaactacaaatatttaaaaatattttatagtctttactcatttgtattctttttttattgttgcaattaaattagccatgccattttacattatgcttttttacttaatattttattaaacatttatgcatgattatatagtccttatatactattcaaatatttacataatatttcttcatttgctgtctcaaattatttaaacaatcccatattgtttaacctatattaacaagattttgatattaaaggtttaaaaatagaaaaaataagacaacaaaggggacattctactatgtggctgaaaactatataaccaccatataccaggtatattaatagttatggataagaatgtgatatttatactcatatatatatatatatatatatatatatatatatatattttttttttttttttttttttttttttttttggagatggagtttcagctcttgttgcacaggctggagtgcagtggcacaatcttggctcaccacaacctccgtctcccaggttcaagcgattctcctccctcagcctcccaagtagctgggactacaggcatgagccaccatgcccagctagttttgtacttttagtagaggtggggtttctccatgttggtcaggctggtcttgaattcccgacctcaggtgatctgcccgcctcagcctcccaaagtgctgggattacaggcgtgagccaccgtgcctggcatttttttctttcttaaacttgaaattttttccctcctaaccttaaatgatttgtctgaaattccatattcagtcacaggtacagatctacttcccttttcttccagttggctaataatgcagctttaagtgagtagtcatagaattgtaggactagaaaggacttataaagtccagcttcttgcctccagacagtagggatactcagtcactgagtatctttttttatttttgaagttctcctgggaaagagatttcataactctatctggaagcactgttacttttttattttttttattttttgagaaggagcctcgctctgtcgcacaggctagagtgcagtgacatgtaaatcaatcttaaatgacatttactatagtttgagctcctttcactcagtcagtagttactgatcacctgctatgtgcaggacacaacattaggcaccgagaagtacacaaatcaaggtttcagtcccaaagaacaggtgagcctcttgtggggattgaatggccttgaatatcactttaaaatctttggactttattctgagccatcacagatatcttagtgtagatgtgatactgtggaagtgatattttaagtagaattaatgtgtggttctgggaagcaaggttttatttatcattcattcagcaaatatttggtcaaactctaatatatataagtcatcaggttaaggaatatggaacagataaataactagaaaacacaatttgttctctggttggaagattttaaatatgcaagtacataagtaatcacagtataagatagggagttctgtgcagataatagagacaggtggggaggtctttttttctggttgcatttaattcatgagagcaggaaatggggattacactggttttggaggataaactatatatatatatatattttttttctttttttagttttgctctcgttgcccatgctggagtgcaatggtgcgatctcggctcaccgcaacctctgcctcccgggttcaagcaattctcctgcctcagcctcccgagtagctgggattacagccatgcgccaccacgcccggctaattttgtatttttagtagagacggggtttctccatgttggtcaggcaggtctcgaactcccgacctcagttgacccacctgcctcggcctcccaaagtgctgagattacaggtgtgagccaccccgcccggcctgaggataaacaatatttctgaagaatgtgaattctggactctgccattgcattcaaagatcctgctactagaaaaacattttcattcagactccaaaagctcagttactcagagaagtgaggttagtatggtaggaaggggctggcaattaggagacaaacttatcatcagtgctttgccattaacagaccgtatgtgtgacctttggacagtgcactaacttgaacttttgttttcttcttttcttttcttttctttttctttttttttttttttttttttttgagacagagtcttgctttgtcacccaggctgaagtgcagaggcataatcacagctcactgcagccttgacttcctgggctcaagcatcctcctgcctcagcctcccaagtagctgggaccataggcatgtgccaccacacctagaaatgtttaaataatttttatgtagagatggcggtctcatactggctttgaactcctgggctcaagcaaacctccccgccagcctcccagagttctgggattacaggcatgagacatcactcctggcctattttcttattttcaaaatgtataacatgccttgatgattttttaaggcattttcccactttatagaaatatatattaatatatggagagtttggtagttacgagcatgaatctaccttgtttgtgtcctggatcaaccattcctcatctctttgattaggctcattaatctacctcggtttatctgtaaaatggagatcttcgtaatacacttctttatagggccaatatgaagatgaaaagtgttagaacaatacttggcacagactaagtactcagtaaatattagttgttattggaatggtatcagggtagatggcagagtagaaagctccaggaaattgtgccttcaccaaaacaattgaattaattgtgtaaggaactgtgtgagacaactattttggaactctgagtatagaagaacacttgtagcatccaggggcaaagtctctggtaaatttcagaaaatcatggtcaagttcagctttcacattgtagcagctaccatcttccaccctcaacctcatggcaggcagctgtcagtccacaagccttcctggtgcagcacactggagccagggtgagcaaagaggattttcacgtatcagaagagaaagagaaaggggcagaaaaaatatttaaagaaataatggagcaaaacatccccgccaaaaggaaagaactgaatatatgccaccatgagctcaatgtactccaagcaagataaacactatgagattaatgccaagatatattagagtcaaactgttaaagcccaaacatggagtggagagcaggcataaatccttctttatcagtaatcacattgaatgtaaatggataacaattaaaaatggaaaaaatgtaaatggatgaaattcaactatgaaaagatagagattagaagattacatttaaaaaaacaggattcatctatatgctgtctacaagagacatactttacatatgaggacagaaggggttgaaagttaaaagatggaaaaagatattctatgcaaatattaactaaaagagaaccaagataggtatatcattgtagataaaataaactttaaatcaaaagcagttacaagagataaaggacactatatattaattaaaaggttcaatacagcaagaagagataacagatatatatacacctaacaaaggtgccccagaatataagaagtaaaaattgacagagtcaaagggagaaatagacagttctaaaataataattagagacttaattactcccactttcaatagggattagaacaactagaaagaagatcagtaggaaatattggacttgaacaacactgtaaagcaattaaacctaacagacgtgcagaatattcccacctaacaacataatacccattcttgtcaagtgcacatggaacattttccaggatagattatttgttaaaccatcaaacaagtcttaataagtgaaaatattcaggtcttacagagtatattttccagttacaatagaataagagaaggatatccatttttaccacttctgttgaatattgtactggagtttctacccaggacaattaggcaagaaaaggaattaaaaagcttccatgttggaaaggaagaagtgaaattttctctattcacagatgacatgatttcaaatgtagaaaatcctaaggaattcactaaaaagaactgatagaagtaatgagcttagcaaggttgcagggtacaaggtcagtatagaaaaatcagctgtatttctgtacaatgcaatgaacaatctgaaaatgaaattaaaccaattttatttacagtggcaccaaaaggaataaaatacttagaaataaatttaataaaacaagtgtaatacactctgaaaactacaaaacaatgttgaaagagattaatagggttaagaaggcaatactcaccaaattgatctgtagattcaacatgattcctattagaatcccatctggcttctttgtagaattaacaagatgatcatgggaattcatatgtaaacccaagagacccagaatagccaaaacagccttgaaaaagaagaaagttataggactcaccctttccaatttaaaaaagtgctacaaagctacagtattcaagacagtgttgacataaagataaacatgtcgaccaatgaaatgtattagaaagccctctaaacccctctatggtcagttgattttcaacaaaggtaccaagatcattcaagggggaaagaataatggtcttccacagatggtgctgggactaccagatatccacatgcaaaataatagagatctttaccttaaacatatacaaaaattaactcaaaatgaatcagagacctaaatgtaagagccaaaagtataaaactcctagaataaaacacaagaagaaatcttcctgaccttgaatgtggtgatggattcttaggtatgacactaaaagcataagcaataaaaggaaaaaaatattgcacatcatcaagattaagaacttttgtgcttcaaaagacactatcaagaaagtgaaaagttaacccacagaatggaggggagtatatgcagatcatatatttgataagagagttacatagagaatatataaaaaattcttaccactcagtaataaaaagacaacctaatttttaaaatgggcaaagaatctgaaaagattctttctgcaaagaagatatacaataagagtaatgattaagatgaaaggttttagccgggtgtggtggctcacgcctataatcccagcactttggaaggcctaggtgggcggatcacaaggtcaggagttcgaaaccagcctggccaatatggtgaaaccccgtctctactaaaaatacaaaaattagccaggtgtagtggtgggcgcctgtagtcccagctactcgggaagctgagacaggagaattgcttgaacccgggaggcagaagttgcagtgagccgagatcgcaccacggcactccagcttgggctacggagcgagactctgtctcaaaaaaaaaaaaagttgaactcgtagaaacagagtagaagggtgtaccagggcttgagggtgggagaaatggagagatattagttaaggggtccaaactttcatttataagatgagtaagttctggagacctaacggacagcatggtatctacagttaatgtatatttgacatttgctgagagagtggatcttaagtattgtaagcatacacatagaacatgtgagtagatggagatgttaatgctgtggcagtcatttcacactctatacgtacttcagacatcacattgtgtccctcttatatatatttgatttttatttgccaattttatttcaataaagctcagggggaggaggaaataaaataataatgaaataaaatgaaaaatagaatcatatatatcctacttccctcccagaattgttacaagaatcaaatgaggtaacttaaggaaagtaatttataaaatgcaaatttaattaatatataaaatacaaacattatagcaataagcataattgccattattaaacattatactagtgccgccttattcaaggaggatatattccaatacctccagtggatacatagtactcaaccttgtataaactgtttttgcctatgcatacatacctgtgataaaggttaatttataaataaggcaaagtaaagattaacaacaacaataataaagtagaacaattataacaatatactgtgataaaaattatgtgaatgtggtctcctaaaatatcttattgtactgtgctcacctattttcgtaccttggtgttctgaggataactgaaaccacaaaaaacaaaaccgtggatgagagaacactgtattaaataaatataataacattatattatgctttccctcttctaatagatcaagcttacttttaagttggttctgttgtcatttctaaccattggtgtaccaagtaatctcttgtatgtagtgagtgctcagtaaatgtactagaaaaaaatttaactgaaatagtgtaatatttgatataatataaaatatttaggtagtattttgttttcctgagagggtaccacagactgttttgaatgtcatatcaataatctgtttattttgataaaggtaacttagataatccttaccattgtatttatagcccagcacagtgatagtttacaatcttaacatacatctatctttaactatcaattttaggaggccaagaattcagtcgataagatattatcagtaataaactggtcaaaaaaaggtgtaaaaacttgtatgagggccgggcacggtggctcatgcctgtaatcccagcacttcgggagttcgaggcgggtggatcacaaggtgaaaagatcgagaccatcctggctaatgtggtgaaaccccatctctactaaaaatacaaaagttagctgggcatggtggcggacacctgtagtcccagctactcgggaggctgaggcaggagaatcacttgaacccaggaggtggaggttgcagcgagctgagattgcgccactgccactcctgcctggcgacagagcaagactccatctcaaaattaaattaaaataaataaataaataaataaataaataaataaataacttgtacgattcctgtattgtttcctttgaagatgtggtttgcaattgagaaacatttttgagacagaaataaaagatgaaaaaggcttccatcggatgggtctgtttccctcttgagctctcccacacattgacacagcatctctcatggaccaggggcagtgccgctgcctgtccccaaggaagctccctaagcccagtgcaggaagagaagcgtgctaaataagataccctgcagacaagagaatgacatcgttgatgaaaacaaatttttctatgtttgtctttattttaacaaacagcattttgggtttgttaagtaaaaacccatttacattaatttttcaggtaataagtttaagacaaatatacctaaagtataaaatgacttgaagttctatttaaaatgagttgtctaaattataaatcagaaagtctacacagtgaagttacgagtgaaaagtccacttggtgtttgtcctgattgtttttcggcaggcttagcacagtgagcccctggagagacttggaagtgtgtgtgggcacagtaagtgactagttaaaagtttatgtttcaagttagtgttaccaaacttggaggatgaagatttgaaagtataatggcctagtactgacttctctgtagccacacactttaccttcaggcagggcacactcagtagtcctctgtgataaggcaggaaggtcagagtatattgaggggtctgtcatgagcgcagtagctgcccagcagccctcaggccctgcaagatacccccctgctgagccatcacatttgtagggggcaacatgatgtcggagaccagggccaggtctatgttccatcctcatcagcctggaggaaggtgacaggagtaagttggaggagaagcaaagtctgggaggcttcattcctgccccggatgttttcctctttggactgcagcctctggtagctgtagagatgcagttttcctgctcaggccaccagtctcacttttggaagaccaataattgtgcatatgtttctgactctgcttattgtagtgtttctcgtaggcaggtagttgaatctcaccttagggtattattttgatgttagcatatgatacacgccctgctatagttctgctgtgccttggttgctatgtgacattctgaggtttttgctgtccttgttgccctaatttctttgtttgtgaaaataagcagcgtcattcaagagaaattatgcttcctctgtaaaacagacttttaatccaagaatgttcctactgctttaagaattcaaagcattgtcttttaaccagccttgcacatttatctattttagctgaggtttgttctgtttgaagctaaactaagcttagtgcttgcctctatgtggtaataattaaagttgggctttatgatttctgaggacaatatttcttggtcttactttgttgattcttttatgtttgtaatgtcagtttcatctttcttgtggtcattgtcttccaaaaatccttttattgccagtcagtgtgaatccttttgttctgaatgcctacataaatttttgactggaagttcaatttaggatattttgtggattttagaaaaacacttttcaattcatttgatttgtttttttccctttttattctcagttgcattattcaaataatataatctgttcttatcttgtgccatctccagttttacttctgcttctacaaccttgtgacatcaaaacatccaaccattaaaacatgttctacaggccggatgtggtggctcacgcctgtaatctcagcacttttggaggctgaggcgggtggatcacttgaggtcaggagcaagaccagccaggccaacatggcaaaaccccatctctactaaaaatactaaaaaataaaaataaaaaaaaataaaaacaaaaattacttgggcgtagtggcaggcacctgtaatcccagctcctctggaggctgaggcaggagaattgcttgaacccgggaggcagcctgggcgacagagtaagactcgatcttgagaagaggagaggggaggggaggggaggggaggagagggaaagttttacatatgaacagtgtcaacttttatcaaggcaatctgtattatggtgaccattactagaattcctttttataccttttaaagtacactattggctttctgcttttgctgatttgtgatgatctgaatctatttacagattattattcatgtgaataattactatgatgtttcttgatttttttttaactttgtcagcattttcagttcaactagaatttttaaaccagaaaacaaaacagaacccctgagctgttattgctgatgtgattggttcttcatcctatcctgagtcaggttattcttcccagaactctaataaaaattagcctaagtagaaatcgagtcatttattctgacccctgcttgtcttgggaattgccacttcatctttttgtttctaagtgtcttgttttctttgaaggtggtccccaccattcaggtttgtggttattgacatcctagaaatgaagttggctttgttacctgtgtgtttggaaatttatacatttctgatttaaaagaatacactaaatatttcttaacttctgtagttaagaaaaaagctggccgggcgcggtggctcacgcctgtaatcccagcactttgggaggccgaggcgggcggatcacgaggtcaggagatcgagaccatcctggctaacacggtgaaaccccgtctctactaaaaatacaaaaaaaaaattagccgggcgtggtagtgggcgcctgtagtcccagctactcaggaggctgaggcaggagaatggcgtgaacccgggaggcggagcttgcagtgagccgagatcgcgccactgcactccagcctgggcgacagagagagactccgtctcaaaaaaaaaaaaaaaaagaaagaaaaaagcttcggccaggcgcagtggctcacacttgtaatcccagccctttgggaggccaaggcaggtggatcacaaggtcaggagttcgagaccagcctgaccaacatggtgaaaccccgtctctactgaaaatacaaaaattagctgggcatggtggtgcgcacctataatcccagctacttaggaggctgaggcaggagaatcacttgaacctggcaggcggaggttgcagtgagccgagatcgcgccactgctttccagcctgggcgacagagcgagattccttttaaaaaaaaaaaaaagtttctttttttttttgtttatctttaatttgtagttaagtgataattttaaacgatctgttatgtgagaaatactattttgaaaattttctacaataggcatattataaatcgaatatctttgaagaataataaacatttttttgacaaggtcttttttattatttatttatttttattttatttatttatttattttgagacggagtctcactcttgcccaggctggaatgcaatggcacaatttcagctcactgcagcctccgcctccggggttcaagcagttctcctgcctcagcctccagagcagctaggattacaggcacatgccaccacacccagctaattatgtatttttagtagagacggggtttccccatgttggccaggcatgtctcgaactcctgacctcaggtgatccgtccgccttggcctcccaaagtgctgggattacaggcatgagccactggacccagcctgagacagggtcttactctattgccaagggtggagtgcagtggcacgatcttgactcattgcaacctgtgcctcccaggttcaaactatcctcgtgcttcagcctcccaagtagctaggattacaggtgtgggccaggacacctggctaatttgtatatttttagtacagacaggatttcaccatgttgaccaggccggtctcaaactcctgacctcagatgatctgcccaccttggcctcccaaagtgctgggattacaggcatgagccaccacacctggccataaatatcatttttataaagcagtctaatggatcaaataccttcatatccattattgccttaaaatgctctaatataaatatcgttatacctgtatacaagataaaatggattccattagtttaggtgatattatggcttgtatgtgacaaaactgagacttgaattcgtgtctttagaattcatgttctgtatttgacctgccatacaacagtaccactccaaatagttttcacctggagaaaaatgtgtaatggtgaattggatgtttattataaaatgtgcgtattgttggcatgacttattgattccacagatgagatgcttaggagcctttgtcaaatcagtcaagtgaagaaagatgttcttcaaattgtgattttctctgcagcaattgagctgtgggcctagagacttaagttatgatttttacatttttcttctatctcatggagtgagatctttattgttagttagaaagctagaaagttaaactgttcatgtcaacaagttcatgcattaaaatcctatagctgtcctgagtacagaaatcaacctgatgtcatggaacaccaagcagttcctgccaggactggcaaagtggacaggctccatagaaaggtttcttgtcatttaccctacatcctatcctgagagttgagtagctgtttcatcagccaaaaagggtaaacttgagatgtgtgctcggtacagttgcatcttaaacaacatggatttgaactgtgtgggtccacttgtacacagatttttttcaataaataaaggtggcccaccgtattggtgggttctgcatccacaaccaaatgcagatcaaaatacagtattcgcaggcatcctgtgtgtatggaggaccagcttgagaaagtgcagatttttgtatccgcggggatcctggaagcaatcccttgtagacatctaggaacaactatacttaagtaaaattaggtagaggtaaatggtcttgtgtgggttttttttaagagtagtaatactcaaaatgtggttgtgggtccaatagcatcaacataaccttggaacttgttaaaaatgcacattagggggccccaccccagacctgctgaatcaaagtctggaggtgggacccggcaacctgtttcaacaaggctgtgattctgattcctgcaaacatttgaaaatatctgctctagagtcacactgggagatataaggctgtaagataaagatttatggttggcctgggaagagtagtgctggcaagagtgggaatgtatttagatttgtattcaggagttgctttataactcagggttggaatgataacttaaagactaatcataactgatactaaggtattcagttttctttcaagactacactatgcacttcacttgttaatacatacatttgaatctcattataaaggttgctactcatgattttcaaaaaacataatcagccgggtgcggtggctcacgcctgtaatcccagcactttgggaggccgaggcgggcagatcacgaggtcaggagattgagatcatcctggctaacacggtgaaaccctgtctctactaaaaatacaaaaaattagccgggcatggtggcaggcacctgtaatcccagctacttgggaggctgaggcaggagaatggcgtgaacctgggaggcagagcttgcaatgagcagagatggcgccattgcactccagcctgggcagcagagcgagactccatctcaaaaaaaaaataataataataatcaaatagaacaagtacagttctttacccagaaatcatatgtatggaaactcagccatagcgctatgctactactgacctagtaacaaggtgcttcaatgaagccaaatgtctgaaacttgttacttttgagtgctagactcataaaccaaaccctgtagacagatcctactgccatagtgtgaatctaaattagaaaaaaatgcatttatttactatattgttcactttcatacatgaataaatcatataaaatatggtctgttcctcagtgttgtatttattctgataaaaagggaattagacaagtacacttggggaattttaaagtagcacatacaatcataaatgccagtcttttatagtcaatatttttatcagtttcttagttatatgtaactgtctgacttgggtaggaaggtagagaaacacctttgaatgaagtcttgtcaaataagaagctgaaaataaaaggaatatgaggcttaaacttcttatttctgaaattatctttatgcttcagtttagagtcattttctaagacttgtatttttaaagttttattagagtaaatctgatttttggtgaggaggagtggtacccagtcactaaatggctgggaaggtgggcagaatattttgctattttaacaaatccattagtagcaagcactattgacattgccttgtcagagtcatatttcatgctggtgtactgatgcaggtgtccaaagtcacaaacagaggtggtgtcaaagcctgtgaatttagcactgaaagtcactgagatatcgtagcccttttcaaatccagtcagtcaaaaagaatttactaagtaactagaatgtgatttattgtctgtcttgagaaccagaattatgataaccccacagaattttctgcattgatggaaatgttctattttttgtgctgtccactatggtagtcactagccacactgaataccagaaatctgggtcatgcaacccaggaactgcattttaaaattattttatttcattttactttatttcatttaaatatgattagctacatggcccagtggctaccttactggccaacacaatgtagaaggtggctttcaaggttctgtcaccacagggacccttgtacagtacatataaatctttccatggtaacttgccaaactgcctaacacttgataactgtcagcagatagagaagcatagtttcctctaccccaccatccccacccccaacccaatttcatgccttcatgtgagccccatctaatcgtgtgcctggctagccaactgccccgtcagtttgtgtcccttccctttcccatatgttggttcctccagggttgattgtggcaggatcttccttacccatatccaagtagggagtcctgtcctccctcctgggagatggtctggtatcttggaaagagaacagactggctttgaagccagttggtttgtattacagccctgtcatggactaggactagtggtatacaattagttggttgttatttaacctcctccgaagatgggaatagtcatgtttaccctgtggggttgttgtgaagaggactaagagcatagcaagtgaattaaagccatcagactctaaccagctagtatgggtagcaaagaaggctcagtgtaaatgttgtgtatatgagcaggtgatggaaaagtgatatccactgctaatgattgtgattctttttaatatttaggaggataaagataataggttttgagtaagtaacactaaataaccctagtttttgctaaacaatagacaacaactaatttgaaattgctgaaggtataattcacagtagtgacagcagcagtgccgaccatccttcccactgagcccttgcacgtgggaagctcttctcggaactctgcatcaattcattaatttcattttcacaagaaatctgtgtagtgcttacatctactctgaatgctcccgatttataaaaaccgagtcacaaagacattaaatttgtccacagccacacagcttgtaagtggcaaagccaggatttaattccagagtttttaggtcaaaaacctatacgtcctctccttcctcccatgtcatcgtgtgctgtgcattagattctcacgtgcttggtcacatgccacccagcgtttttattctaagcctttattttaaatttatgccattcttagatgcctacattaaaacacccgggactcagttgttacaaggtctggtttatctgtttcaaatgtactctcctgccttcctctattccctgtaaatgtgaatgtgtgtttatccattaatttagtaaacatctgttgagacccttgcacatgtcagatactgtgaagtacctaataaaaaagaaaggcaaaaaaagaaacagctgttgtattctagaagttcagtttttagttgtagaggcagacccttgaacatgacagtgtggaaagcaccattggagcacagagaaaagagcaacttttcccaggaaactggaagaaggaatgacattcattccaaaatcattgattttccaggcactggtgagccacccagccaaagccccttctctcacagaggcaacattctagaagggacttaattaacatgattaagtccatcttctgtctcccgtgtagaaggccatattctttctattgcagcaccggtaacctactgtgttttgttgtttcctggtatatgtctctctatgaacttgaagccctctcagctagcccccacccagagatcctagtttattttttattttcagtaaatctagtgaaaaacccagtcattttcattttcaaagtgattttaactcatagtctaaattgaaaaataatgttttcctaagtagatattagtaagtttgcaaagctagaattaaacgagggctttctttgattccccagttataagtggggtcatgtttttgagtgaaaggctgggttttctcccccaaattaatgagtcagttaaaaaatatacacctgtagcatgatcaccacagtatctctccctgtataaggcgctccagcatagtagccctgctggacagacagaagatgcatctaccatccagcttcagcctttggccagtgggtcccagagttgaaactgaattgtaaacgacattatcccaagcatgccttccatgaaaagaaaaatgtagattatattttctgacaacttcagttctcaatctatccccctttagatagctaaccattaaaagagggaaggaaaaaagggaggagaaggaaggaagaaaaaaatttctatttgcctttgttttctttctgtcactgcattaatacctattaatccactaatcctctttgccactctccacagacgaaaacacattcttccttgacagtaaacaagcaaatcgatcctaatttatgatttggaataaatactgtgactgggcatggtggctcactcctgtaatcccagcactttgggaggctgaagtgggtggatcacctgaggtcaggagttcgagaccagcctggccaacatggtgaaaccctgtctctactaaaaatacaaaaattagccaggcgtggtggcgggtgcctgtaatctcagctactctggagtctgaagcaggagaattgcttgtacctgggaggcataggttgcggtgagccgccaagattgcagcactgcactccagcctgggtgacaagagtgggactccatctcaaaaaaaaaaaaaaactgcttgttttttaaggtagttatagtaatctacatgttagttacattgtccctatctacatattcagtgtaaaatgtattcttgatttaatttgttgctaagcacagaaaaaaatcaagaaaacctaactagtaggaaaataaaagtaaacatctttcgtgaaactgggaattcctaaaacaagttgctaggagggtatttcaccgttgacagtgctgatagtgatagaaaatgaaaagatgtttcacatggttttccttctttggtcttttagtctcaattactttttcttaagtctattaaattgttccctgtttaattgagttccacgtatataacattctcaggtgagaagtggaaatagttcttaatgcaaagcgtttgtttaggcagccatttctgagatgtaatcagaaaacattttgacacattgtcatttttattgatcatacaatattctctattttttaaaaaaagcagccaggtgtggtgacacattcctgtaatcctaacactttcggaggcagaggctgaagggtcacttgttgtctgggcaacatagcaagactccattaaacaacaacaacaaattacacacacacacacacacacacacacacacacacacacacacatatttttaaaagctttccaccagacacacacacacacacgtatatttttaaaagctttccaccagaaactctagcacttagacttcactgaagactgttatgtctagttttttttgtgtagtttatttgtgtgtgtaactcttccacattttagcctgtcctaccactatggccaccaacttctcaagtatgctctgagaatttactggaaagtaaatgcatatcctcaaaagtttcttgtaagaatgcaaccctgtctctactaaaaatacaaaaaaaaaaaaaattagccgggcgtggtggcgggcgcctgtagtcccagctacttgggaggctgaggcaggagaattgcgtgaacccaggaggcggagcgtgcagtgagccaagatcgcgccactgcactccagcctgggtgacagagcgagactccatctcaaaaaaaaaaaaaaaaaagtatcagtgggagtccaacatcatgataatgttcattggtagtgttgggtatatgtgtgacttatcacgtgagatttaacaacttaggttttgttcttagtttcagttcaatcttcacaaaagctaaacatgctgaatgttcagtctcaatctatacatgctatatcaacgtgctttttgtttgtcatataacatttgtgacaatgagatctgtagagagattgtaaaggccacaccacgtggtgttggattgattgcagcataaaaagaaatggaaagttcatgctatctagatagatagcactggtactatagatatgaatgtttaaaagatgtgatttcctctgcctgctaataaaggaaacagaacatgaattttttctgcagaaacttgatgatgtgatagtgtggcatgctgattacattgactccaaagtgcagtccttgtccctgggcagtgcccatgtgctcccttcctctcccttcacacacccacagcacactttgtcctgcctctcctgggaagcctcctagcagctcccagaggggccgcccttggagcatcacatccgagtcacaaccttttcctttacagtgaaactgtcctcttagcagccttgttgtcctggactggattcccagtcccctgtcaccgtgtccgctgtgtcacaagtggtcattaaagggagagtggaatgaaccaaatggacctggagatggatttcaagatctttcccatatccatttgcctcacaaatctatttgatttgtgctattatgtgacttgatttcccagatcatatagatcatatcatatttagtcacgttatatttgtgactaaaatttcaggcttttcacattatgctgaatcatactttaaactcattcagattccctaattcagaaactatgatcttttggatctacttagattaatgcttacctgtgtagttatctttgggggataaaggagacttgtgagtatatgagaagaatggacaagatttcaaatatatgtttaccttaaattagagaattaagtattttcaataacatttctgcagaaacaggtaatatgctaatcaaaacttgcttgtatctgttttaagaggcttactgtattttctgtatcctaaggaccatcattttgttacttaataaggtttaaagcaacaaactaaatttccttatgaataatttctgttctagactaatttaatttgagtaacttgagttgggaagaatggccttaacaccttggactgggcagaacatacatagttctaatattggtatgtttatctgcaaactaggaggttctaaatacacacatacactttacctactgcttccttcttcttagctgttaaaacagtattactttatcatatctttaaaaaattaacttgaatcaaaaagctagaagtttataacacctttcatccacctgacagtgtgcatcagatctgcagtcagccccaggcagtgccagacactgcacccaccgtacccttttattctcctgtggctttctctgcctttccccctcccactccatctgcccctgcccttcctttctctctttctcacaacttttttccttatctctgggttaccatacctatcggctattggcttaaaataatattatgtcaagtttgtattggaaaaattatatggaaatttattaggtattagatactaagaaaaaaatgtatctaggataaatgacaattagagaatgagactctacctcttgaaaagaaatcatgggagtataagctttacgtataattaatcatatgcctccgtgttaggcaagttgagcccagaacatagtacgtgaagttaaaaataagcattttatcttctatcagggaaatttgagtactagaaattttgcataaagccaaaacttaagtttgtgtaactagtactgataattggacagaaattagatactgaccattgttaattggtgttttttcttaatatatggaagtcttaaagactggaaaactcatgaacataaaatgactagtgggatgattgagaggaatgttgttttagattgattaatgttatacaatgtctattttttattaaattttttatttttagataattgtagatttacatttagttgtacaaaataatacagacagatcaacttccttctttctcctttccctacccccaccccacaacctaaacccctggcaaccactgtcttattttctgttgcttataacagaatacctgaaactgggtaacttataaagaagagggatttatttcttacacttatggagcctgaatttatttcttacacttatggaggtcgaggggttgcatctggtgagggccttcttgctggtggagactctgcagagtcttgagatggcaccaccattacatggcaagagagctgagcatgctaggtcaggtctctctacctcttgtaaaaccgccaatcccactcccatgataacccattagtccattaattcatgagtggattaatccattcatgagagcagagccctcatgacccagtcatctctttaaggctccacctctcaatgctgccacattggggattaagcttcaacatgagttttggaggggcacatattcaaaccatagcaaccaaaatatgctctccacttctttaggtattggcttttttcacttagcatcattctctggagattaatacaagtcattgtctgtatcaatagtctgtttctttttattgctgaatagtattccatgatatggatttaacattttgtttaaccattcacccattgatagacatttaggttgttgccagtttgggactattattaataaagctgctaacattcatatgtaggtcttcatatgaacataagttttcatttctctgagataaatgcccaggagtacaaatgctaggttgtttggtagttgcgtgcttagttttgtggggttttttttccaaaagaaaaaaactgccaaacttttccagagtagttatacaattttacatttctgccagcagtatatgagcaatgtagtttctccacatccttgccagcattcaatgttgatattatgttttgttttagccattttgcctcactgtggttttaatgtgcattttcttaatggctaatgatgtagaacatctttccttgtgctaatgtgccatttatatagcttttcaatgaaatgtctgttcatacctgttgtttcttaattggattgttcattttttatactgtgtggttttcagaattctctatatgttctaaatactagtcctttcttggtatgtggtttgaaattgaaatgattttccctatgtctctagcttgtctttccatcctccaaagggggtctttcttagagcaaaagttttcagttttgataagttctagtttatcaagttttttttgttgttgttagcttgtttttgagagggagtctcgctctgtcgaccaggctggagtgcagtggcaagacctcagctcactgcaacctccgcctcctgggttcaaacagttctcctgcctcaccctcccgagtagctggaactacaggcacgtgccagcacacctggctaatttttgtatttttagtagagacagaggtttcaccatgttggcaaggctggtctcgaactcccgatctcagttgatccgtcagccttggcctcccaaagtgctgggattacagacgtgagccactgcgctcggcctcaagttcattttaaacagatcaaattttttatcttaagtctaagtactctttccctagtcctagatcctaaagattttctcttaaatttttccctaacatttttctcgttttatagtttacgtttatattcatcatcaattttgagttaaatggtatataagttgtgagaatgaggttaaagcttatatttttctgcctatgattatccaaagtctatccttccttaattgaattgccttggcacttttgtcaaaaatcagttggtaggctgcgcacaggggcctatttctgggaggcagagacgagaagattacttgaggtcaggacttcaaggccagtctggccaacatggtgaaaccccatctctaccaaaaaaatacaaaaaaaataacggggcatggtggcgcacctgcagtcccagctacccgagaggctgaggtaggagaatcacttgaacctgggaggcagacggaggttgctgtgagccgagatgttgccattgcactccagcctgggcgacagagcaagaccctgcctcaaaaaaaaaaaaaaaaaaaaaaatcaactggtgctgagcatggtggtgcacagtgtatctgtggtcccatctagtcaggaagctaaagcaggaagatcacctgatcccaggagtttgaggctggcctgggcaacatagtgagaccctatctctaaaacaaaaacaaacaaaaatcacactgtggagatcaatttaaaaaaaaaatcagttgggcatatttgtgtagtatatttctgggttcttctgtttcattgatctatgtgtctatcccttcaataacaccatataatattggttattatagttataaaataagtctttaaattagggaaagtgatctcctttacttcattctttttcaaaattgttttagctatgttagttcctttgcctttccttgcaacttttaaaattagcatatatatatatatatatatatatatatatatatatatatatatatatatatatatacacgtatgtatctgcaaacaaaatcatgctggaattgatgggaatttctttaagcctatagatccatttggggagctccttgattttggcatctttatgattttgagtttttcaatccataaatatgtcttccatttgttaagatctttgatttattttatcagtgttttgtagcttcagcatataagtcattacatgttttgtgagattcacactgacatgggttattttggtctttttttttttttagttttacaattttaaatggtatgtttttcccattttggtgtccatgaattcattgacaatatgtagaaatacacctaatttttgtgtgtgttggtttcttcaaccttgcttaatagttctaggagttattttgtagattccttgccatttcctgtgtaagcaatcatgccacctttaaataaggacatttttatttattctttttaatctgtatgcctttccccacctatcttgtcttattgcactagctagaacttctggtactatgttgaatcaaagttgtgagggaggaaatttttgccttgttttccatcttaggtggcaagcatctactctttcatcattaattttaatgctagttgtgggatttctgttgataattctttattaagctgtggaagttctctttctgatttcagaggttttttaaaattattattaaggatggacgttgaattatgtcaagtggttttttcacattgctaatgtaatcatctgatttttctccttcagccttcaacttggtgaaggtgattttcaaataccaaacaaggccatcttgcctggaattaacaccacttggtcatattgcataacttcttttatacattgctaaattctatttgctaacatattgttaaagaattttgtatctgtgttattgaggtatattggtttatagtttgtttttttttttttttttttttgtactgtctttggttttagtatcagagtaatacttgctttataaaagggattggaagtgtttcctcctcttctgttttctagaagacagtgtgtagaattggtgctagttcttcttttcccatttgttagaattctccagtgaaagtatctggacctggagataccacttttgggagttttaaaattacaaatttggccgggcatggtggctcacacctataatcccagcactttgggaggccgagggcggcggatcactaggttaggggtttgagaccagcctggctagcatggtgaaacccccatctctattaaaaatgcaaaaaaatttgccgggcatggtggcgcgcgcctgtagtcccagctactcgggaggctgaggcaggagaattgcttgaacccagcaggcagaggaggttgcagtgaaccgagatcacaccactgcactgcagcctgggcaacagagcatgactccatctcaaaacaaaaaaaaaaaattacatatttattttccttaatagttataggctattcaaataatctgtttcatatagcatgagttgtggtagttatttttgtttctttttgagaaatttgtccatttcatctaagttgtgagaatgtatgtagacttgtccattgtactttacctagccttgtgatatgtacagggcctgtagtgacagcctccgtcttattcttgatattggtaatttgtatcttctgccttttttcattttttagtcaattcattgatcttttcaaataactctattgcattgtttttttctctgttgtttttctgttcaattttatttatttctgctctttaattatttccagctgggtacggtgactcacccctgtaatcccagcactttgagaggctggggtgggtggatcacctgagatcaggagtttgagaccatcctgaccaacatggtgaatgaaacctggtctctactttaaaaatataaaaattagccgggactggtggtgggcacctgtaatcccagctactcaggaggctgaggcaggagaattgcttgaacccaggtagcggagattgcagtgaaccgagatcgtgccactgcactccagcccaggtgacagagcaagactctgtctcaaaaaaaaaaaaaaaaattatttcttttcactttctctgagtttattttgctctacttttttctaggtttttgaggtaagaacttagattattgatttgagacttttttcttttttaatgtaagctttaagttctgtaaaatttcctctcagtatcacttcagctgtttctcacaagttttgataggttaaatttgtattttcatttagttcagtgtttgtttttacattttcattgagacttcctctttgacccttggattatttagaaatatgttgtttaatttcaaagtgtttggagaatttcatgttatcattctgttattgatttttagtttgattgtactgtgattagagaatatactctatatgatttcagttcttttaaatttgtttatatgtgtcttatggcacatgcattttgtgggcacctgaaaaaaatatgtattctgctgttgtttggtggagtattctataatgtcagctagaacctgtttattgatggtggtgttgtgctcttctgtattctttctgatattctctctagttctatcaaatgttgagggagagatgttgatgtctgcaattctaattgtggatttgtctattctttgagttttatcagtttttgcttcatgtattttgaatctatgttgtttgttgcagatacatttaggattgctatgtcttcatggtggattgatctttgtgtcattatgtaatgtgcctttctatatttggagttttctgtgctctgaaatctacttcatctgatattaatatagcactcccactatattttaatcaatgtttacatgatgtatcttttctcattttttactttcatcctacctatatgtctgtatttgaagtgagtttcttgtagacggcatatagatggatcataaatttactctgccaatctctgtcttttaattggtttatttagaccatttatcctcagtgtaattattgatacattagggcttaagtgtacctttttactttttgttttctttgttctctggtttttttttttgttttatttttcctggtttcatatgggttacttgaacattaatttttttagaattttatttataacgttttggtgtatatctctttttatagatattttattgcttgctctgggtattacatatatgtaacttagcacagtctactgggtcaaaattttaccagtttccgtgaagtatagaaaccatacctccctttatatcccctttccctccctatttatttatttatttatttatttatttatttatcttttagaataacaaaaaacattttactaaaacataagatttgcagaaatttccagacaagccatacaaaatggtcacaagctttttttgaaggggggaatctacatttgacagcagtgttattagtgagggctgtgatgtttgtttaatgttcccattttggttcaatcaatcaagcttgtccatctacagcatctaaataaagttagacttggctagagagcatattctaaagacctggttagctgcttttaaccaatgcaattagatcaccaaaaaagggggaaaggaacccataaaattaaactacctcccccctcaaaaaaaataaaataaagaaaaacacgcacatccctgcagctaaccggacaactaccttcattcacagtgctttatacttaaaccaggatgggggaagtaaatagaaacggggcgggggggcactgcttttaaacgtttcacaacaatccagatgatacttctagcttctgctcatgctttatgacagtgaatcaggacaagacatagatttgctaatgtgcatttaatcaccaaaggactgaagatgtctgggcttttttattcagtaatgtttctaagactgtgtccattaaatgcaaacaaaaaggaggaagtcttggcagaacaggagaagtgatgcacacttgatgatcggatcaatttaaatattattcatggcatatagcctagttcatgctctagctgtttctatggcttgggctttgttggtcttccactgctctgctacatcatttgctaatggatcgtctggattgggagcacataacaaggcctgggttgatagcagaactgtgtgcggatctgcagtgctggggaccagttacctttcaaaatatcgaaacatattcttcccaacttgtctacattaggatgataaattttggtcatgaaacatactgtaggggctgccattgagtattcttctggaaggaatagttcaagtttaaaagtccctccctcaaagggggaaggaatcctgagagccagcaatgaccacatgaaaataacaggcattgctctcatctggttctgctttgatgccaggaactggttctgccagcaaaccctgggtttccttgatgatcctgcggggcagccctgccatcttatcagaacccgagttcggcctctggtctagtctccggctccgcttgcctcacgcacgagtagaagtcctccctccctatttataatatgattgtctttaatgttttatctgcatacatttagaaccacctcagacaatgttataatttttgttacaataaaaatttagaaaactcaagaggagtaggaaagcctcttgtatgtacctgtattattttatctatagccttccatttctatttctttcttcccacaggtccttggttctgttgggggttttttgtttgttttttgaagaggagttttgcttttgttgcccgggttggagtgcaatggtgcgatcttggctcaccacaacctccacctcccaggttcaagcgattctcctgcctcagcctcccgagtagctgggattacagccatgccccaccacgcccagctaattatgtattttttagtagagatagggtttcttcatgttggtcaggctggtctcgaactcctgacctcaggtgatcgcccgcctcggcctcccaaaacactgggattacaggcatgagccaccatgcccagccaggttttttactttttttttaagtctgttttccctttattatttatattgggtaatttttattatttttatcttcgactttattgattcttttctctttctcctcctttctgctgttgaacctattcttttattttcactatttttttagttctgaaacttccatttttaagaaatatttattctgtttatttgctgagactattttttttcatttgtctcaagtgcgtcaaggttgcttattaaagcttttttaaatggctgctttagaatctttgccagataattctaacctttatgttatctcagtattgacatctattaactgtctttattcattcaagttgagatttttcatggttcttagtataacaagtgatttttgatagaaacatggacatttggagtattatgttttgagactctggatcttattgaaacctcttttaggtagcttcatctgacactgctctggtaggagaaagtgaggagtggagtgggttgttactgccacgtggagagggaagtccaggttcctcagttgacagttgagagagggagagactccttgttcctgctgggcaggggtatgagttccagctccctgctaagcctctgctgacaccaccctggctgggagggccagggaagccttgttgctgttcctcacatgccttctgctgaggggtaggagggaagggtggcctcagcaccactgagcagcggtgaaaatcctgattctctgccacacttcctctggcaccaccccagaggggcagggagtgttgcttggttactactgtcaggaggaggtgaagtccaggcccccaggtagtctctccattgtcacaatgaggggagtactcgttgcaggcctgtgggagatcaaagtcctccaggcacggtggctcacgcctgtaatcccagcactttgggaggccgaggcgggcaaatcacctgaggtcaggagtttgagaccagcctggtcaccatgatgaaacccagtctctacaaaaaaaaaaaaaaaaaaaaaaaaaagaattagctggacatgatggtgggcgcctgtagtcccagctatttgggaggctgaggtgggagaatcacttgaacttgggaggcagaggttgcagtgagctgagatcgtgcccccagctgggcgacagagtaagactccatctcaaaaaaaagaaaaaggaaaagaaagctccttggcccaccttctctggtatcccagctgggatactggggtgctctcattacagcccaatgaggggggaagtccaggtcttcacttggcctgtgctagcatgcatagggacaagtcataggtttttcatgatgtttacctagagtagagcagttaccatctaagagttttctgcctttctaggctgccccttccttggtccttggttaaagagagcaggctttggtagagctttttgtcagcacatgttactgtttccgggttgctggctccttcagctcaaaacctgagatataagaggcaaaaagaaaacccagggccgggcacagtggctcacatctgtaatcctagcacttcgggaggccaaggtgggtggatcacttgaagtcaggagtttgagaccaatctggccaacatggcaaaaccttctctctactaaaaaactaaaaaaaaatactgggcatggtgattcatgcctgttattccagctactcaggaggctgaggcacgagaattatttgaatccaggaggcagaggtttcagtgagctgagaccatgccactgcactccagcctgggcgacagagccgagaccatgtctcaaaaaaagaaaaagaaaagaaaaagaaaacccaggaacttgccactgcctcattcctgaagtcctgaggtctctaggttttagcctgttggtctcttctctccacctctcggtgtcttcttatgtttactttacatataatatcaggcattttagttgtacttaattagaggaataggggaaagtgtgatactccgtcctcccagaatcagaagtcccaaatttttaatattaagcagcgccatgttttaaggaataggcattaaagtgttttctcttgtccaaggactgagaagaaccaggagaattttgtctgctctatttcctgactccttttctattaatacttaaatgtgaggtattcagcaactatagtcagtttgatagcaaaggtagatgctcctttggcatttaatggtatgttctttgaaagagctatcaaaatttctgaaggttttatttgtacattttatttcattgtttgggcacttttttgaggctgttgacagtttttgtttatcctccgtatttccccctgaggggtcttgaggccatactgggagggcacaagggagcccaagcccagggacttagccttcttccatcccttcctgacacagggctttcactagaacagtgaagtcagactactggtggccatgctggagcatgaaggacagctgtgcctctgtgggtgggcttggctttagctgtccatagcaggcgagtcattgctctttgcattcctgatttagcaagaatatgaggggaccccaatattgcaaagaaactgttgcatgtctttctcttttccaggcaaaaactgattattccaagtggaagttgccctgttattctgaatacttacttttgtgagaaagttgttgccaaagaagattcagaaaaaacttgtgaagtgtactgtccggacataccccttccaagaagaagcatctctttggcccagatgtttgtaattaagggtctaacaaataattcacctgaaatccaggtaaactcctattggcctaaaggttttatgcttgtaataatgttagtgactggatttggaagggcttcagtgtaagtgaagatgttagccttttgtctccctccaaaaaccccaccacaaggatgtatgctgcatgaacttactgttacgcctgaatatattatagttcagttcagcatttagtggtgctcttgttacagtatttcatctttctaattatgtgtctttaatctttattctaatttattaaaatagagtcatgcatcacttaacagggatatggtctgagaaatttgtcattaggtgattttgtcattgtgtgaccatcatagcgtgcacttacacaaacctagatggtccagcctactacacacctaggctatatggtatggctgattgcttctaggctacaaacctgcatggtggcaagtacttgtgtatgtaaacgtatctaaacatagaaaaaggatagtaaaaatacagtccaaaagataaaaaatggtgcacctgtatagggtatttaccataaatggagcccgtagaactggaagttgctctcgatgagtcagtgagtgagtggggagtgaatgtgaaggcctcggacactactgtagactttataaaccctgaacacttgcactacactaaattaaatttttttcttcagtaataagttaaccttaatttactgtaactttctagctttataaactttaaatttttcattaacttttttactcttttatagcaacacttagcttacaacacaaatacattgtacagctataaaaaatattttttctttatatccttttttctatttttatttttatttttttacttttaaaactttttttgttgtaaactaaaacacaaacatacacaatagcctagatcttcacagggtcagggccatcaatatcaccatcttccacctccacatcttgtcccactggaatgtgttgagggacagtaacatgcatgaagctgtcatctccttggataacaatgccttcttctggataccttctgaagtacctgtctaaggatgttttacagataacttgttttttaacaagtagaatactctaaaataacaataaaaagtatagtacagtaaatacataagccagtaacattgtttattattatcaaatattagatactgtacataacaggatgtgctagacttttatgcaactggcaacacactacctttttttttatactttaagttttagggtacatgtgcacaacgtgcaggtttgttacatatgtatacatgttccatgttggtgtgctgcacccattaactcgtcatttagcattaggtatatctcctaatgctatccctacccctttcccccactccacaacaggccccagtgtgtgatcttccccttcctgtgtccatgggcaacacactacttttgtttacaccagcattaccacaaacatgtgaatacatcactaggcaacaggaatttttcgtctccatcatagttttatgagaccacggtcaaacatgctgtccattgttgacagaagcatcattatacagtgcatgctggtatttgacaacgttcattttctctattcttgtaatgtctaagaatttttaaagccctcctttatttatttaaaaaatcatattttgcttttccacaatatgtattatcccttggaataaaaagaactgcataagcttgagtttatatgctggagttgttttttggaattttactgatcctaagccatgatcatgtgccaagatgaatttagggaaccactaaaattcacttgctgtgggcatgaatggcccctgggaccaccctaagcactgaatgtttgtgtggctcccagtgcactggcctcaagatctctgggttatataagttgtcgctgaacagaatgcttcctgagactgacagatcaagggaggaagaatacgaaagaaaagtagacaaactttcagcctcttttgtgccagccagtcaagcaaaatctctctttgactatcaaaagaagtatctggagaggattatgcaaaaaggaagactctcgaatcaatttaattataacatcaaaaatatggcccagagcacattactgttttaacatatagttttaaacagctatgtaatattaatcccatgagattcatttttgtcctgtgacagtgataatgaaactacttgtagcataatggttaaacgtgtgaactttggagccagatgacctggttcaaatcctgcctcagccacttcctgctgggtcatcttgggcaagatctgtggtctctatgtctcagttttcttatctgtaaaatggaggtgtgatattatctatcttcttgggtgattgtgtgagggtaagcatgtttaatatgtacatttaaaagcctggaatataggaagcactctagaagtgttgttgttttattatgacagctgatactacgtaaggggttgttgggagaatatgtgagcatgtaaaatgctcagcctaggagattgcacatacaagaacttaataaaatgaagcatttgtattatccctagtcattcttttatcttcatttttagtttgttctgttggaattcttacctcaaaagagaaaaatttattgaattatcatgaattattttattagcagaacttcctgtgtgttttcaaagacctgcctggtatagcaaacatcctgctgtggtccttgttctttcactcgccttcagcttgcagtcttagccacctggcaggcccagagccccatgccacaagttcctttattttcatcttcatcatcacttcagtgtagtgcagatccattgggtggctgcttaaggatgtcattatttggtgtgcagcatgttgcttgttgttagccgaactgaaactttgtgagtcttgaaactgttccctttatgtgtcttggccaggttgtgtgtagtggtgtagccactacagggacagcctggacccatgggcacaaagaagcaaaacagcgcatcccaaccagcactcccctgagggattctctcctggatgtggtggaaagccagggagctgcctcgtggccaggagctggagtccgagtggtggtgcaaagagtgtattctcttcccagcagagacagcaccaggggtcagcagggggccagctcaggacacacagacccagctggaactcggtgagtgccaagatgctggtgtggggcagaggtgaagagtcacttagacagagtgctctagaaagtggagcctcttctcagagcacgttcttagctgcattcaccatatacgtgagctgtttttgtttttccttgcatcaaaatttgggatacatggcatgatgaaggattttatctatctatttaattttaaagtcctattaaaaattaaatttgctgcattttgttttacctttaatggttcatgttcttgaaagtaatacaaatgcaagaaatattggtattattctggaaaagccaagacatgtggttgtcatacctcaaaagaccatttgcaacatccagttttatatgtctcgaaaacctgagtaaataatggcaattggtaaacctgtggctttcagagagtactgtatcaaaccatctgcatcagtactgcctaatacaactttctgcaatgatgtaaatgtcgtctgtctgcaccatccaatgcagttaagtgcagacaaatgtagtagaagtgatgttgtctctactcagatttaggcccttcctggtgttggttcttacagatagctgtagacgcatgattgacagagaggtttgtttgtttacatcagagcctcagcatagccttttttctttttgcaatctctgcctctggagttcaagagattctcgtgcccaagtagctgggattacaggcttgcaccaccatgcctggctaatttttgtatttttagtagagacaaggttttgctatgttggccaggctggtctcaaactcctggcctcaagtgatccacccgcctcggcctcccaaagtgctggtattactggcgtgagccaccacgcccagtctggcatagccttttgaagttatctctggcaatgataattgccctcaaagaagtaacatggatttccaacagaatagaaattaaaagtatagatgctacttcatcagtttggttttgtttaactattaataagaaaacacgtagtgaagaaatagtacttaacaatcatcctggccgggcatggttgctcacacatataatcccagcactttgggaggagccctaggcaggcaggtcacttgagcccaggagtttgagaccagcctgggcaaagcaagagagcaagaccccatctctaatataaagacaatgcaatcatcctatcattatgctgccttctgatgccagagagagaaacaggatacctatactccggtgtgaattatgaatcatcttcaagtggaggcactttatttgaaaatactatgaatttgagaaagtcgtcttgaggtctagagttggagaatgtttcttttggaattacagaaaaaagattcttttttggaatatgtatgtttgtaaaatccattaaatcagttttaaggtatttatcatggcttgtagatgtagaccagtcttctaccctttgccctaaatctgtggtaaatttatatagaattttccaagacagttacacatcagacataggtttttgttttgtgtttttgttttgcttggcctttttaatgacacatatccagtgttaggttttgaagaaggggatactagttaccttggcaatgaggaacttggtagagcttcctcatctcagtacacagaccacacactccaaggggacgaggaaacagagacagtggggaactgaatcaccctgacgagaaagaacgacaaaactgacagtgcggttgcttcctatgactaatcacaaccaatgcacgttatgaaggctgtccctctaggtccttcagtggtacttgttttacttgtttagcaaagagagaaaaactagaagctaaaatctggtgaaatgctaccgatgtgagttgcattgtgaatgctttggagttgtactttggaatacatgtggtgacatatctaatgagaatatccttgtggtagactgaaagaaggccaggcatgaacttcaaaaacaagaaaacaacatccagttattcagagttaatgaatatgcattctgtgtgatgcattttctgtagcacatctgagattgcacaatatcgaggctagacaatattatttccactttgcagatgaggaaacacagcctcaaggaggatctcactgctgacacaggtagacacaaagaaaaatgaatgggatatagaatcccagatggcatggttgtagagtgttagagtttaaaagaaaagggagaggctaggcgcggtggctcatgcctgtaatcccagcactttgggaggccgaggcgggcggatctcgaggtcaggggatcgagaccatcctggccaacatggtgaaaccccgtctctactaaaaatacgaaaattagttgggcatggtggtgcgtgcctgcagtcccagctactctggagactgaggcagaagaatcgcttaaacagggaggcggaggttgcagtgagccaagatcgtgccactgcactccagcctggggacagatgagacttccgtctcaaaaagaaaagggagaaaattgagttagaaccaagccgtgtttagattaaggctgacccagggtcaagttgtccagggcagcagaagtgcaagtgttttgccctggggagacttggttggactgtgtacaaagatgaactttggaactaacggccgtagtgctagccttgagtttgaggacagggctgctgagatgtctttgggtacaagaagatctgatcattaatattttctagattattttgcagtgataatgatcaggctctctagtttacatatcaaattaatatagaagtaaaactgtactttattcactactaattctttgctaatatatttagaaagaaaaacttagagaatatatctgccttcgagacacatttagcagtatgcattctaaggcagttttttatacatgtacatgtagcacgaatattattagaagatgcagatgtgtagcctggaagattttctgcctgtgattcctgctttcagcttcctgatcatagatgacatatggaatgctctgtgggtcccacaggatggacaaagttgggctcagttagtacagactcatcagcacaacacacacagaagaaggaaaattgcataagcagtgacccctttcaactaaaggcagctctaagtctggtctccttgtctttcagaatggcttttcttgagctcttgtcattatctgctctaccccagagatctttcaaactatccgtgaacttaaagacaaccttgattactgtgtgttttctgtgaagtccagaaattaccatgtcagaagaaattaagcctgggtgaaaagaaacagcggtgtcttatggcagatttgtttgccacaatagttgccccttccccacccagcccaggtcaggtggttgctgatgaaaccctgtggtaaatttctgtcttaagtttacttcacaccttgatcgtaggtgtcaatctcagtctgttcccagtcctcggtcagtgtcacttttctgataccagtaacagcttatcttctgaaagctgacagctcaattagtgccaacctcgaaattaaaagaaaattttttgaagcagctagtcctattcagggtcagatagattctctcaaaagattcatgtcctctgcactgtgaaacattatcagaaatagactttacatttcagaaatatagtatgttagagtcccctgtccattgttcttctggatgacttcctgtaacttgagctattaatgaaaacgtttctgtgaggtttctcaaggtgttgtaggtcagagtaaccaacgcaaacttaagttttataaatcactaaaatcaaaggtaacaaaaaactgatgcagaaggtgctccctaaccacagggtaggcagtctgttcagagcccaaacacaccttttttatagatagactacatgttgaatgatcattagataaatgcatgactaataaagccataggcttttttttttttaacagaaagggagcactggccttcgaggtaacttataatgaaaactgaggcaaagagagaaagtgatgattccttagtgattctctgtgtcctggtggtgcaggtccagaccatattacctcactccaagcccatggtgattgccagcagacatcacctttctttctccctttctaaaacattctcttcctttcttcttgagatatttaacctagggaccagtaatttatttttttcttttttttgaaacatggtcttgctctgttgcctaggctggagtgcagtggagcaatcatggcttactgcagcctcaacctcctgggctcgagcagtccttccacctcagcctccaagtagttggaaccacaggcacgtgccaccatacccagctaattttttttttttttttttggtagagatagggtctcactctgttgcccaggctgatctcaaacttgtaacctcaagcaatcctcctgccttggctttccaaagtactaggactacaggcgtgagccaccatacccggccaactaatgtaatctctgtcctttagagatgcaaattctttcttgcccttcattgcagaaatattttaaagtggagagttagtcctttgcaagaggacagaacgtgctaaatagtcgtgtcttcagacaaaaagctggagaaattcactgagctgaactcagaagaaaagcacattttcctttttccataccttgatgttttactcctctttttggtcttttggcctttgctttattctcatgttgtatatttattccttctttccactaagggaaaaaaaaatccaccatgccctggaccaggtcctgggcctgcagtggttaacaaaaccagacattgtctctgtgctcctggagcatagttctagtgggagatcccacacaaaatactttacaacaaatgcatttatgattacaagttgcaataagtaccctggtgagaaaaaatagggcacaatggagaatggacataatttagtttagagggttcaaagatggtgttctaaggcagtactatttaagtttaggtgttaggtaaagagaagatgaaagagaattgctcacagaagagagaatacctttgaaaagctcttggacaggagggagaagccagcatgaccatgctgcacaggccagcaagagatcccaggcacgcaaccggccacagcctagtggaccatgtgcaggagctgcagtgtttgctgtggctgcccactgaccaagaatgaggttgccctgcttgaaagtcagctttagctaccaggggtttagtaagatgggcacatggggcagggcctagtgaaagcagagagacgcaggaagcagctactgccgtagtccaggtcagagaggactggtgggttcctgagtctcctgtggctttgccagagctagagaaaagatccgtggtctagatgtgtgtgatggcttcataatggattggttgggggaggagcaaagtagaagggaatgttcagagagtgagcctcagcttgagttatttagttgaaggatgttcccatttgctgagatgagaaaaactatagtgagagcaggtctggaagaaagcttgagaatgcagtctaggcctactaagtttgagattcctatgagacatcgaagaagagatgtcctgtgagaaagctggacgtacataccttacgcccagagggttttagattggacatgaatgtttgggagctctcagcctatgtctggtcagtatgtatctttgtatgtacattcattttgtttgcgggtgtcagcaggttatatttgtttatggtgccaagctccaaaggcactaatgcgtgtgagtgcaaggcagcagtgtcctgtcacagccaagtctacagccagggctgtggaggaggtcactttagggaaacaatagagacaaaggaaagaagaaatgcaggcattgaactccaaggtcctcttgcattggaaagcaggtagaagaggagcccactgaggagacagaggaggctgggctggtgaagccaagaggaaaccagagctcgtggcaagcgctcaggatggtgcttccatgtgggaggggacccatagtactgcaaagtctaataaagtgagcactgaaaatctgtgccccagatttgggaggagttgctgggtcacttcacgagcaggaggtgtagggagcagtgagcacagaagctcacttagcagagtagagtgggtgggatgccagaggagaagcaagcttggataacaaatgttttgttgatgcatacgaggatgacaatgtccaaatttacatagaacaaaagaactgcaatgagggcattctgtctcttgtttcctaatgtgtatgcaggtaccatttttcttttaaatatgcatagaggctggtggtttaatggaaagaacaaaaaatctggaatcagactggtgtgggttcactggtgacaggacatttagcagggagactggggcaaattgtgtttccttgtctgtgaaattggtattataatactataatgcagactggtggtgaggactgattgggatgatgtatgtgaagtactcagcaggatgcttcccatatgacaagcactcagtaaaaagcagctcactcactctttaacagtaagcatagatgcttaaaaaaaatagtggtaaagagcattgctacaataatagaaacctgaactaagcaaagacaagctatcgcattacaaatcagcactcagtgttggtactgagtctgccatctggctgctgaggaagcttgcttgaaggtgatttttatttctatgcttttggccacctcattccccacctctacccctagcactcccatcaacaaggagttgatgcccatttactttggaaaagaagcatttgtgtaaatttgtatgtgaagtgtgaccactgctgtctaaatgatggagatacggaagttcctctggaataaacatattgcagaaaactgccctaatgctggggccagtgttgaatggtgctgatactgtggttggaaatttttttactttgtccagagcattaaacaaagatcccggctgggcacagtggctcatgcctgtaatcccagcactttgggaggccgaggtgggtggatcacgaggtcaagagatcgagaccatcctggctaacacgatgaaaccccgtctttactaaaaatacaaaaaaaaaaaaattagctgggcgtggtggtgggcacctgtagtcccagctactagggaggctgaggcaggagaatggcgtgaacccaggaggtggagcttgcagtgagccgagatcgcaccactgcactccagcctgggcaacagagcgagactccatctcaaaaaaacaaacaaacaaacaaacaaaaaacaaggatcccaaactcctgatggtgagaatggttcagattaaggccgaatgaggaacatgcactagtagatcgtggatgtgatgattaggggcattagcctttgcatgtgtttggacagtggagaaagactcttggataaagcttactagactccttttgaaaagctggtcagctgtggcacactgattccccagctgtgtgctcacctgctgtgtcctgctgggtgaatacagctcttctccctggttgtgaaccgttacttttcttcccactaaacagttgggagatattcttgactctgcctccttttctctgtatggagacagggtggcatacattccttcgctgtaacggtggcatatgcctgtctacagttaaagagcctgaagggaagacagctccctcgtcaacaacacaggggaccatttcacctgcttttcttttatgtaccaccacatactgccagagctggcagaatgactattcatccatctgcttagcatcacattttcataaggtggttgttgtcactcatactttctttatttctgaagtctctttgcttcttcctgttgtagaaaagttggaattgttccttttcaatgatttgaatattttttattgtaatgtgaaagattgtgagtgcagagtatcattttttttgcatgtccttgtaattgatgccatagcccatgccttaggtttgttcttacctttgctcattcaataaatttaaatcatcccttaattaattagttctgtgtccatgagtcttaagtaaaccttttaatctcagctgcccatctattcttaacctttgcttgtttcctctctaaaacagttattggcagtccttatgatatccaaggccatttgacattgtttcttctcagccctggctcaatattaaagcctaatgaggaacatgcactagtagatcatggatgtgatgattaggggccttagcctttgtgtgtgtttggacagtggaaaaagactcttgcatcaagcttactaaatttcttttgaaaaggtagtcaaccattttgactnnnnnnnnnnnnnnnnnnnncttgatccaagagtctttctccactgtccaaacacacacaaaggctaattctagtagtagaagtagtcttactactgcttattttactaattgacatccagaccctttatattctttgccattcttcctgtccacatgccaacttactgtaagaataaagacatatcagaacccatggaattacagtctagtgtttatggttctgtcatgtatacatagttccaatctagaaattggaacttgactcatggggacctgaaggaatctatcttatctctatcacatttttaaagagctttattgatacataattcacatcccataaaattcatttatttaaagtgtacaattcaattgtgtttattgtaattacagacttgtgcaatcataactataatacgatattagaactttctgcaacctcaaaaagaaaccccataccaattgactgccaattcccaattcttcccagcccctggcaaccactcatctactttttgtcgctacagatttgcttattctggatacttcatatacataaaatcacaaatctttcgtgactggcttcttttacctagcataatatttttaaggtttatccatgttgtgacatgtttcagtacttcattccttgttatggatgaataataatccattttctgtgaatataccatattttatttctcttttgagttgatgcacatctgagttgtttccactttatgattaacatgaatagtgctactatgaatatctgcatacaagttttttgtgtggatatattttcatttctcttgaatatatacctaggcatggaattgctgagtcataaggtaactctatgtttgattttctgagggactgccacagtattttccaaagtggctacacgattttacattcccatcagcaatgtaaaatataccagggttccactttctccacatccactccaaaatttgttattgttgtctttcttattgtagccatccatgtgtgtctgaagtgggtatctcattgtggctttgatttgcatttcctgatgactaacaatgttgagcatcttttcttttttttattttttattttttgagatggagtctcgctctgtcgccagggcggagtgcagtggcacgatctcagctcactgcaacctcggcctcctggttccaggcgattcttctgcctcagcctcccgagtagctgggactacacgtgcgtgtgcgctaccacgcccagctaattttttgtatttttagtagagacggggtttcaccatgttggcctggatggtctctatctctcgacctcatcatctgcctgcctcggcctcccaaagtgttgggattacaggcgtgagccaccgcacccggctgagcatcttttcataggctattggccatttgtatatcttctttagagaaatgtctttcaagtcctttgcctatttttaaagttggattattttttgttgttgaattgtaagagttctctgtataagtcctttatcatttgcaaatattttttcccattctgtggagtttttcacttttttgatagtgtcctttgaaacacaaagatttatcattttaatgaggtccaatttgtcatttttgttattattattgcttgtgttttcagggtcatagctaagaaaccattggtgaatccaaggttatgcaaacatacttctgtgttttcttctaagaattttatagcttttgcccttatattttggtctgtgatccattttgagttaatttgtgtgtatggtccaacattgtgggttggaccctccttgtagttagagattatgtttagtactagtagtagtctttatattttatttaaatgtatatcttatttttggcatttgttacagtttgcactgttacgtctttgtgtgcatagcatttcttcctttgtaggtggcagaaaatggatccatttctccaccctttgtctcttttagcttttatcattttattgatctagtgtttggttacagctatctgattgaaaaagtaatagtttcagagtagagttagaggtgtaaataatatgaaagtaatatgtacacgctctttaaacacttgataataccaacctgtatcatttgacccatgttatcatttatagctatacacattgaataactttcttggtgaacttacggataatatgaaaactgctgtgaaagttttcatgctcttttttcctatatattaaaccagtgatagacttaaagggaaaagtgaaatggaatggcaacagcctggggatgtgagtacagacaattatgaagttttggtaatagaatgaaaacagcaagagtaattttccagattatgctatgtgtaaccaccattctaagtttgcgtcttaacctggccatggtgattttccagcacctgtcatccatgaagatcaagaaggatttcaaggtggccctatataaaagccatggaattttttcctccctgtttctgacctcctttctctggaaacttttgttcctaaaagagactggagacctggaacagtctccctactcttcccaccgtacccccaccccattcctgcagctgcaatctggagcagcactgtgatcacactagatcacactttcctgtgagtcagactgcagctctggaatgtgctttgctgagatgacggcacagagaagagccatgggagacagagcacacagcctggcagagtcttcaggggtggccagatgcaagcacacagtgccacgtgcctctgtgggcatgaagcagagaaaggatgagatcaagcctgacccaacttgacttcctcctctagctgagccaccgcaccttgctgcccctctcctccccttttgcctctgtcaaatgacctactctgccctctctcccagctgctgctagacccagagcacttggtgcagccagctggcgggtttggtaggctcacccttgttgtgctgatttcttggctccacagttctcaatggcttgagccagctcagctctttctccacagggaactggagcaaaaatcctgtagagcaattcttgggttggacacccccttcccacgagagaggattatacatgaacagatgcccttgtttcttcctcacttgctgctctggcactggtattataaatggtctgaattttcacatttatttgcacagatacaaaagacagtgacagatgcttgattatatagtgagactaacaaccaggtattaaacattgcactgatacttgtcattgccttcaaaataagctctacgtgttttctttacttcagttgtctcatttaaccataaataagtcctcagaggtcaggggctgtgactcatctggttttggtactggaccatgaatgcagtagacacccagcaagtatgggttgatgggaaacagcaatggctgattgagcagctgagaaggtggggtgaggttgtggctccccttctcttctcaggatgaaccagtccatggagttgtgctacaaatgttgttgtttgtctaaggagattgatgagaatgccagtgagctagaaattgccaggaatactctgctttgggacagaggtgatgtctagtctgttccaatcagatagaggatgagacactgggaaccaaggtccctgaagaatattcagtcagtgtaaacaaacagggaacagcacaaggagggacacttaggaaagtggcaagggaggaacaagggcagctcttgggtgaagatgtttataaagaaaatagaggctgggcccggtgtctcacgcctgtaatcccagcactttgggaggccgagacgggcagatcacgaggtcaggagatcgagaccatcctggctaacacagtgaaaccccgtctctactaaaaatacaaaaaattagccaggcatggtggctggtgcctgtagtcccagctacttgggaggctgaggcaggagagtggcgtcaacccaggaggcggagcttgcagtgagcccagatcacaccactgcactccagcctgggcaacagagcgagactccatctcaaaaaaaaaagaaaatagagaattcagtcgataatgatgtaagggttttaaagcatttattacaattaatatagaactgaaagttcaagcaaaaattaagcaaccacaggcagatgatagaagaattaaaatatgacatttaacattgaatgaaataaaattacctgagaggaaggaactcatcatttgaattaaacaaaaaaggagaactgagccgtcaagaggtagcttgtggggagagactcctcaggcctctggtagttgtatgtcaaggcaactgtgtgaggccttccacacgtacctggcctgccacctggtttcccataagcgcaagaccacccttcctttctttggtgtggaatctcagtgcaggttgtctacagctcctagaggagggaacaagagaggactagattatatttgcctgctatggagtgggaagaagagtgaaataaatgtcaaaatcttcttgatgcctcccaatgaaatcagacttttggaaaacttcagaagtggcttattcagctttgtacctcgagtctttgcacacaggtaagttaaatagaacgctgactactctggaatcccacagacattgaatgaggagaagctgaacatctctgaggacctatctcctcaagagctatggaaaagtgggaaactgcagtgacagcaaggataccaggaaatcttgtctttaaaatttttgaacgtaattctggcttgtactcagctcatggttgcatcattctctcttcagaaaaggctagaacaagatttcctgaaatgatatatgttcaagagctaccacatatttgggagaaagtgtcattcctaatggcagaccataaaagcactatctggtaatttacttttatgtttcagttttgaacttcttccaggtgcttcctaaatattaatatctggtctctgttttatgtttgggtggaaagttggggagagtatagcccaaggagctgaggagcaacgatgaagccacatacctgtgagcactgtgacttttaggccttgtggcaactatgactcatctgtcacctctgcctggacagagtgtgctctgttaatattgtggtaaaaacaacactaagtatgcccatttacttatatgcatttatatgtgtccgctttatacactacctggaagcttccataagaagagactgtttccagtcactgccgccacggaggaaatggatgctatgcggcaggctccctgaatgcctgctagaaccatgtgaattgtatgtgtatgtatgcattaacttatatttatttgtttatttactgatataaaattaacataaaattggccattttaaagtatgtaattcagtggtagcacattcacaatgctgtactaccaactctatatcattccaaaacagttcagtcacaccaaaggaaatcctgtacatattaagcagtccctccccactaaccccttccccagcccattgcaaccaccagtctgctttctgtttctgtgtatttgtctattctgaatatttcatacaaatagaatgataacagcatctgaccttttgtgtctggcttcttaaacttaggataatgttttcaaggctcatccatgctgtagcatgtaccagtatttcatttctttttatggctgaataatattctgttgtatagatatatcacatcttatgcatttatcagtttatggacatttgtgttgttttcactttttggctattatgaataatgttgctacgaacatctgcacagaagtttttctgtggacatctgttttcatttctcttggtgtagatatgcttaggagtaagttactgggtcatatggtaattatgtgtttaactttttgaggaaccaccctactgttttccacagtggctacatcattttaaattttcaccagtggtgcaatttctccacatcctcgccagcacttgctattttctttttgtaacaataaccatcctaatgggtgtgaagtggtatctcactgtggcttttattcacatctctctaatgactgatgatgagcttcttttcatgtgctcattgtccatttgcatatctactatggagaaatgatttttcaagtctttttttaaaattatattgtatttttattgttgagttgtaagagttttcttattttattttattttattttaagttccaggttacatgtgcaggatgtgcagctttgttacataggtaaatgtgtgccatggtagtttgctgcacctatcaacccatcacctgggtattaagccccacatgcattagctatttatcctgaggctctccctttccccactccctaccccatacaggccccagtgtgtgttgttcccttccctgtgtccataagttctcattgttcagctcccccttgtaagtgagaacatgtagcgtttggttttctgttcctgtgatattctgctggggataacggctcccagctccatatccacgtccctgcaaaggacatgatctcgttccttctttttttttttattttttaatttttttagatggagtctcgctgtgttgccaggctggaatgcagtggtggcatgatctcagctcactgcaacctctgcctcctgggttcaagcagttctcctgcctcagcctcccaggtagctgggactacagacgtgcaccacaatgcctggctaattttttttgtatgttagtggagacggggtttcaccctgttggccaggatggtcttgatctcctgacctcatgatccgcccacctcggcctcccaaagtgctggaattataggcgtaagccaccacgcccagccgatcttgttccttttatggctgcatagtattccatggtgtatatgtaccacatttgctttatccagtctatcattggtgggcatttgggttgattctgtctttgctattgtgaataatgctgcagtgaacatatgcatgcatgtatcttcatcatagaatgaagatacattatattcctttgggtgtatacccagtaatgagattgctgagtcaaatggtatttctggttctaggtctttgaggaatcaccacactgtcttccacaatggttaaactaatttatattcccatcaacagtgtaacagtgttcctatttctccacagcctcaccagcatctgttgtttcttgactttttaataatcaccatcctgactgacatgagatggtatctcattgtggttttgatttgcatttctgtaagagttctatttttatatattgtagatataagacccctataatatacatgctttgcgaaattttcctcccatcctgtaggttgtctttttactttcttgatagtgtcctttgatacacagaagttttaattttttttttttttaaagagacagggtcttgctctgtcacccaggctggagtgcagtggtgggattatagctcactgcagcctcaaactcttggactcaggcgagcttctcaaagtgctgggattgtaagggtgagtcactatgcccagccaagttttatgtttgatgacactcaaattgtctattttttcttttgttgcttgtgcttttggtatcttttctaagaactgttatcaaatccaaggtcatgaagatttactcctgtgtttttgttcaagaatgttacagttttagcctgtgtatgcatttaggtattggggacattttaaattaatttggctagctcattgcaattcccccttaatcttaggattgacatttctatttctgcgaaaatagcctttttttttttttttttcggccagagtctcactctgtcgcacaggctggaatacagtggcactatcttggctcactgcaacctccgcctctcgggttccagcaattctcctgcctcagtctcccaagtagctgggaatacaggtgcacacactgtaatggacatctccactaaaccccaggcactccaccatgcccggctaattcttgtatttttagtggaaaaggagtttcgccgtattggccaggctggtgagccttatcaaaaaccattggtttttgataaggattgcattgaatcactatatggcagtagcttaataatattcagtttttcagttcatgaagacaagatgcctttccatttatttaggtcttctttaatttctttcagaaatgttttggagttttcattgtacaagtcttatatttccttatttacatttctattttattattttgatgttattataaaccagtttgtttcttaattttcttttcagattgttcattgctagtgtataaaaaaaacaacttatttttgtttgttgatcttgtatcctgcaactttgctgaagtttttagctgtaacagatttttgtggatttttaaaaaattttctacataaaagattgtcatcgcgagtaaagacagttttacttcttcctttccaatttgttttttatttatttctttttcttaattgctgtaggtagaatttccagtacagcgttgaatggaagtagcaaaagcaggaatcattgttttgttcctgatcttggggagagctctcattctttcaccattgagtgtgttagctgtggagttttcatcaatgccctatgccaggttgaggaagttccttcttttcctgctttgttgagtcttttttgtcctgaaagaatcttggattttgtcaagtgctttttctgcacagtataatcacactttttaaattttatatactatatagttaggaatcagagaagtgtgttacctacagtgattcttagtagagaaggtgtttataaccaaattactgaaataattgctttgagtcatcaggatatagaaccagttcaattctactggatccttctttgcagtgatattctctatagtgggaatttacaaatatgtacgtatcattacttttttatttaattacttttaacatgcttctcattttaaaatagttttagctgtatagaaaagtttgcgaagataatacagagcattcccaaatacagagtgttcccacgtactccatacccagtttcccctgttgttacatcttacattattatgacacatacataacaattaattaagcagtattgtcacaatattattcactgaagttcatactttatttaaatctccttagattttccctgatgtccattttctgttgcagcaccccattcgtgatagcacattacatctcattgtcatgtctccttaggctcctgtagactttcttaaatgctttttgctttttattaccaggacaattttgaggattactggacagatattttgtagaggatcccttattttgtgttttttttatatatatttagacaggtatggatttgggagaaaaagattgcctacataaaattccattttcattacatcctatcaaaggtacatactatcaacatgatgtatctctgctggcattaatcatagttgctggctcaggtagcaatcatgatttgtctggtgtctatgaagttactttttaagaaaattaagctatttttaaactcccattttataatgcctgggaggtgaagctggagcatgcactgttacctccattggtacctaagatagtctgaagcaagagcatttgtgacatagacaacaacatcagagaaggcgtggcatacaagctaaatttctgagtagtctttgaagtcaactgttattcatgtttgtttcaggattaatggtataggattgggggcacttctaagaccttaaacataattttgcagtggataaatatatcagattgtatccattcatcagtttatggacattagggccatcaaaagatgcagcatcacccttcagtgctgtcaaatggaaataataaggcctgttgtaagttgccttttgttgcaagtgttaaataggataatatataagagatgttgttccattaatagacctttgtcaagtgcctactgtgtcacatcatcctgcagtgcaaacagtggcatgtacaaaagagagaaaaaacagctcctgtcctaaaatatctgtatgaataaaagccacctccataataagttttgtcctggatgatatgagctaatgtttccaaaatactgaccttagattactttatgccattttgggagtgggaagtactaacttaaaatgaatattgcttctctgagccacattgttggtgttcagctgctgctcagttcttggggtgcgccagagacaagccccagtcttcagggcagtgacaatcatgtcatcaagacttgccacagctttgggtacgctatgttctaatagatttcctttaggccaaaagatatctttaatgccagtaagtgcactgcagaggtttaatgtattgggcaaggatctctaaagtcaggagaccaatgcagagttaacacgcttttgtgtacgtggtttgtgtttgaatcagaattcctctcgtgtcattttctagttggtttggctggattttttttttaagtaatataatctcattcctttatcttctgcaaaagagatccatctatcggtgtaaaggcttttcctgtcatcctcttcattctatacagtccggctatcattattcagtcttgaaggaaaaccaaactgagtttattaaaatctgatatgaattaaaaaaaatttttccctttaaggtgcatacattaactcaaactgtaatataatattaccaagggtgatagataggttgcacagtaaacattctataaattttagcaggaattaatttttttattcagctatagattttaataattttattttctaaatataaattttgaaaacatgtcagtgcatattatacacgaaggagataaacaattgtgttattttctcagaattacctggcaagtaatttattactatatacaaggccttagttttaaaaacccgcatataattgttttatataattaaaatagtttgtgtgtgtgtgtactttgaggtaagaacagctgagcaaccaacttttaaagtaatcgttttttagttccattggtctttttagctttatttatgagaacttacaacttagtttaggaacaatatcaatgtcaaaaatgggatactatgctgtcatctaaaattaaggaatgtgaacagtctgtgttaatatggaatgatcacaaggattattataataaatgaacaaggtccaaaacaagcacaaaagtgtgttaccatttggttaaaacaaagtgccataggcactaatgttctttctatgcatgaaatatctttggaagatacacaagaagctggcaactttaattgccccatgggagaatgaggcagttaggaatagaagggagaagtttgaattttgaactatgtgaatgggttacctgtgttaaaaattagccttttgtaatgaataatctaaaacagagtcctggccagctttaagatttgttaatgattaagttggttttagtcatggagttgatcttgtgtgctctgagatataattctacacaatgaatctctgcatatgtctttttaggtggtaggattattcagctttaaataatttagatgtttggggtcttggtttaaatgtctttttggtgttaacagaatcatggaatcttaagagttcaattggcccttaaatactagttacaaattattgatttactacttcgtctcagctgcacatttgagcacctcccatggtggcacattgctctactgcagcccctgtgcagctccctttcctagaaggctctctcctatcttgagcttgaacctctctccctggatcttctgccccttggaactgacgcttcctctcagggtcatgtagggtcacataggatcagtctgtttgctttttctacatgatactctgaatatgcatatatgtatattacccttttttttttttttaagggatggggtctcactctgttgcctaggcccagtcatggctcactgcagcctcatcaacctcctgggctcaagtgattttcctgcttcagcctcttgagtagctggaaccacaagtgctaagtctttatagtgctgagcttcacattcttttctcctctggctctttaatgtctttaagagcaactctattaatattagttacaaaataattttagccacctgctcagcacatgtattctatttcccccaccgtgctgcctttaaggtggtgtagttaaatgaaaaaaggaataaggaggaaaggaaggaagagaagaaagtttatgctaaagattgaccagagaattctatatcatgtctgtgctgaaggagcccactatcttttcaggaagatagagaggatgtattcatacacatgcatgtgttctattctaatagaatgcaagctattaatagaaagcgtactagcaggatacagatcagagaattacagcagctgccaggagtagtcaaggaagacattttgaaagacaaagttcagccaggttttgagaaggacaagttagatctctctgtgatggtaacatgggatcatttggttttgttttgattatgagatgaaactcaccatttaaaccttttttttttttttttttgagacggagtctcactctgtcaccgaggctggagtgcagtggcgtgatcttggctcactgcaacctctgcatcccgggttcaagcaattttcctgcctcacccttccaagtaactgggattacaggcaccacacctggctaatttttttatttttagtagagacgggttttcgccatgttggccaggctggtctcgaactcctgaccccaggtgatccacccgcctcagcctcccaaagtgctgggattacagggatgagccaccgcacccggcccatttaaaccattttaaagggtatacacaattcatcggttttgtttttttgtttctttggggtttttttgagacagaatctctctctgtcatcaggctggagtgcagtggcgtgatctcggctaactgcaatctccacctcccgggttcaaacgagttccctgcctcagcctcccgtgtagctgggactacaggcacacatcaccacgcccggctaattttttgtattttagtagagacggggtttcaccatgttggccaggatggtctcaatctcctgaccccaggcgatccacccacctcggcctcccaaagtgctgtgattacaggcattagctagcatgcctggcccatttaaaccattttaaagggtatacaattctcactgggtttttgtttttgtttttttgagatggagtctcactctgtcaccaggctggagtgcagtggcacaatctcagctcactgcagtctccgcctcctgggttcaagcaagtccccagcctcagcctcccaagtagctgggactacaggtgcacaccaccatgcccagctaattttttgtattttagtagagacggggtttcaccatgttggccaggatggtctcgatctcctgaccttgtgatccgcccaccttggcctcccaaagtgctgggattacaggcgtgagccaccacgcccggccaattcatatgggttttagtgtgttcacaatgttattgtgaccatcaccactatctaattccaaatgtctggatcattccattttttaataattccttacatgaatcatcttgaaagtgaagcccaaatgaatcatctgggcatgtcatgtagtctcaccctgccttggctgcctcgtctgtagattgtagatttgggttatgtgatctcttcatcctctcatctctgttctcgcttctgtcttattgtgcgcgcctctctcttgatgacctgagcgtctttgaaggaaggggctctgccctttcttgcctgtgtgtgcacatatccatttggcccaggcctctcagtgccgtctggcacagagctgtgtgaatacagggcccccataaatgtttattagagaaatcaaaggtgtgctcagttctaagttgagtgcctagactacagtcagattttcaaactttaaaagttcaagtatgggaggccaaggcaggcagatcacctgaggtcaggagttcaataccagtctggccaacatggtgaaaccctgtctctacaaaaattagccaggcatgatggtgggtgcctgtagtcccagctactcaggaggctgaggcgggagaattgcttgaacccgggaggcggaggttgcagtgactggagatcgtgccattgcactccagcctaggcgacagagtgagatggagggaagtcattgcaagataagactggaaaggtagattgagatcatgttgcagagggcttgagaattatcttatgggcaaactgctgaggcatttgatatgatccaagtagtgtcttagtggcaggcaggaagcagagttcagagcttgaatgtccagggcgaggtgctcagccctgtcagccctgcagggaggcccagcagaggaatggatgcaagagaagggcttcttgagtgatgaaaaaatctggattcagcaatggttaggatttgaggagtaaggaaaacaaaaaggtctaaagatggctttgaagttttcaaccttgataacttggaaaataataggcctggggagagggcaggagaaggtttagacttgaagtcagagacccaccgcttggagcagctgtacagcctgtgacgttccctaagcttctggcctcctggccacaggaggcatagtcctccaagggctgattagaggtaagactcggcctgagtcaggcctatactcaggcactgctgacctgacgcgggtctcctttggtgctctgcctcacctgctgcagcctcacagccagctagggggtgcacagaaggtggagttaatgacaggatgtcatgggaagtaggggctggcgtcccaggaggatgggggtgactcgagagttagcatctgtactacagattaatgtcccaggcacagcatcggccctgcatggatgaggcgaaaaccctttcatccaccaggataactaattgaatcacactttgagcctcttcaagaaaatgaaaaaatgtcaggtcaactccctaaattttcagttgacgttgcaagtaacctcatacattaaaaggctaggttaggtcaagcccataatatgaaattatccaggcaccctctttggtttattcttggccatgttcacttagccacatctagaatgagatggagtagaaaaacacttgtgagtgccaggacacccatgttctttttgccactaagcagcgtggcccacagcagtctcagtatccgctacgccctagtctgtccatctgtgagatgaagatgagagaaattgccacaggaccttgtagtgcactaacagcttggagttttttagccatgtaaagaattaaaatgaggatcatctctttatcataagattgcctcctcttgtaaagtaagtcactgaataagaaatgatttaccacagacaagcaaatgctgagagattttgtcaccaccaggcctgccctaaaagagttcctgaaggaagcactaaacatggaaaggaacatctggtaccagccactgcaaaaacatgccaaattgtaaagaccatcgaggctaggaagaaactgcatcaactaacaagcaaaatagccagctgacatcataatgaaaggatcaaattcacacataacgatattaactttgaatgtaaatgggctaaatgctccaattaaaagacacagactggcaaattggataaagagtcaagacccatcagtgtgctgagactgaggaaacccatctcacgtgcagagacacatataggcccaaaatgaagggatggaggaagatctaccaagcaaatggaaaacagaaaaaggcaggggttgcaatcctagtctctgataaaacagactttaaaccaacaaagatcaaaagagacaaagaaggccattacataatggtaaagggatcaattaaacaagaagaactaactatctgaaatatatatgcacccaatacaggagcacccagattcataaagcaagtcctgagtgacttacagagacttagactcccacacaataataatgggagactttaacaccccactgtcaacattagacagatcaacgagacagaaagttaacaaggatattcaggaattgaactcagctctgcaccaagtggaactaatagacatctacagaactgtccatcccaaatcaacagaatatacattcttttcagcaccacaacacacctattccaaaattgaccacatagttggaagtaaagcactcctcagcaaatgtaaaagaacagaaattataacaaactgtctctcagaccacagtgcaatcaaactagaactcaggattaagaaagtcactcaaaactgctcaactacatggaaactgaacaacctgctcctgaatgactactgggtacataacgaaatgaaggcagaaataaagatgttctttgaaaccaatgagaacaaagacacaacataccagaatctctgggacacattcaaagcagtgtgtagagggaaattgatagcactaaatgcccacaacacaaagcaggaaagatctaaaattgacaccctaacatcacaattaaaagaactagaaaagcaagagcaaacacattcaaaagctagcagaaggcaagaaataactaagatcagagcagaactgaagaagacagagacacaaaaaacccttcaaaaaattaatgaatccaggacctggttttttgaaaagatcaacaaaattgatagaccactagcaagactaataaagaagaaaagagagaagaatcaaagagacgcaataaaaaatgataaaggggatatcaccaccgatcccacagaaatacaaactaccatcagagaatactataaacacctctacgcaaataaactagaaaatctagaagaaatggatacattcctcgacacatacatcctcccaagactaaaccaggaagaagttgaatctctgaatagaccaataacaggctctgaaattgaggcaataatcaataccttaccaaccaaaaaaagtccaggaccatatggattcaaagccgaattctaccagaggtacaaggaggagctggtaccattccttctgaaactattccaatcaatagaaaaagagggaatcctccctaactcattttatgaggccggcatcatcctgataccaaagcctggcagagacacaaccaaaaaagagaattttagaccaatgtccttgatgaacattgatgcaaaaatcctcaataaaatactggcaaatcgaatccagcagcacctcaaaaagcttatccaccatgatcaagtgggcttcatccctgggatgcaaggctggttcaacatacacaaatcaataaatgtaatccagcatataaacagaaccaaagacaaaaactacatgattatctcaatagaggcacaaaaggcctttgacaaaattcaacaaccttcatgctaaaaactctcaataaattaggtattgatgagacgtacctcaaaataataagagctatctatggcaaacccacagccaatatcatactgaatgggcaaaaactggaagcatttcctttgaaaactggcacaagacagggatgccctctctcaccactcctattcaacatagtgttggaagttctggccagggcagtcaggcaggagaaggaaataaagggtattcagttaggaaaagaggaagtcaaattgtccctgtttacagatgacatgattgcatatctagaaaaccccattgtttcagcccaaaatctccttaagctgataagcaacttcagcaaagtctcaggatacaaaatcaatgtgcaaaaatcacaagcattcttatacaccaataacaggcaaacagagagccaaatcatgagtgaactcccattcacaattgcttcaaagagaataaaatacctaggaatccaacttacaagggacgtgaaggacctcttcaaggagaactacaaaccactgctcaatgaaataaaagaggatacaaacaaatggaagaacattccatgctcatgggtaggaagaatcaatatcatgaaaatggccatactgcccaaggtaatttatagattcagtgccatccccatcaagctaccagtgactttcttcacagaattggaaaaaactacttgaaagttcatatggaaccaaaaaagagcccgcattgccaagtcagtcctaagccaaaagaacaaagctggaggtatcacactacctgacttcaaactatactacaaggctacagtaaccaaaacagcatggtactggtaccaaaacagagatatagaccaatggaacagaacagagccctcagaaataatgccgcatatctacaactatctgatctttgacaaacctgagaaaaacaagcaatggggaaaggattccctatttaataaatggtgctgggaaaactggctagccatatgtagaaagctgaaactggataccttccttacaccttatacacaaattaattcaagatggattaaagacttacatgttagacctaaaaccataaaaaccctagaagaaaacctaggcaataccattcaggagataggcatgggcaaggactccatgactaaaacacccaaagcaatggcaacaaaagccaaaattaacaaatgggatctaattaaactaaagagcttctgcacagcaaaagaaactaccatcagagtgaacaggcaacctacagaacgggaggaaattttcacaacctactcatctgacaaagggctaatatccagaatctacaatgaactcaaacaaatttacaagaaaaaaacaaacaaccccatcaacaaatgggcgaaggatatgaacagacactctcaaaagaagacatttatgcagccagaaaacacatgaaaaaatgctcatcgtcactggccatcagagaaatgcaaatcaaaaccacaatgagataccatctcatgccagttagaatggcaatcattaaaaagtcaggaaacaacaggtgctggggaggatgtggagaaataggaacacttttacactgttggtgggactgtaaactagttcaaccattgtggaagtcagtgtggcgattcctcagggatctagaactagaaataccatttgacccagccatcccattactgggtatatacccaaaggattataaatcatgctgctataaagacacatgcacacgtatgtttattgtggcactattcacaatagcaaagaccaggaaccaacccatatgtccaacagcgatagactggattaagcaaatgtggcacatatacaccatggaatactatgcagccataaaaaatgatgagttcacgtcctttgtagggacatggatgaaggtggaaaccatcattctcagcaaactatcacaaggacaaaaaaccgaacaccgcatgttctcactcataggtgggaattgaacaatgagaatacatggacacaggaaggggaagatcacactctggggactgttgtggggtggcgggagcggggagggatagcattaggagatatacctaatgctaaatgacaagttaatgggtgcagcacagcaacatggcacatgtatacatatgtaacaaacctgcacgttgtgcacatgtaccctaaaacttaaagtataataataataaaaatttaaaaaaaaagaaatgatttaccgctagtaggaatttctgatgtcacaaaaaaaatgtttccctttacttaagaattttgaatatttgataaggcattaatttatctgtgatatatattttcatacgaaaaccaaagtaccctaagtgtgtgtatgtgtttaagaaattgctcaggatactctgtctctgcttttgaaaactttctcttccttctatgtgttatagaactaaatccaaacgggaaatttggctttgtgcactgacagatcatgtgattcctcccccctccctggcccccagcacccccatcggtgctcagcgagtcccctgcacactctgttcagtaaacaagtttagagaaccagacccgccggttcattcactgagagcatttggaaagggctgtctttgtgcagccttgacgtactggccggagtggaatggagaagttagcatttgtgttttcattagttctttttatagcagcggaccagctggaactggttaacattagcctgggctgcctggtagtgcacaggtctcttacgcaggatgaagggcttctgatgaaaacagattttgttactcatgataccactgactgtgtttacatgaactcactcattctgtcatgggatgtgatttagaatggcttccttaaaatgcaggaactccctaggtgctattcagatccatccttaaaaacaaacgagagactcaaaaatatagatggctttccctattaaactagccatccttccacagaacatgcttcctgagataatgcttttaaagaaagctaaattttggctacttgggatgttttccccatggtgttttaaaaattggttagagaaggttgtttttcctccagtaacagcaaggaatcatcatcttatggggatagagaataatttaaccaaccatttctgacaaagttcaacagaattgttccatgttttcatgggtagaattctgactaaaggcaaaaattaacaattttaagaatcattagtttaggatacattaatataagttgagcatccctaagccaaaacttgttgagcaccagcatgagtggctgaaatagtgacaccttttctttcttatgagtcagtgtacacaactttgtttcatgtataaaataatttaaaataaaaataaaatgcataaaattaccttcaggctatctgtataaggaatatatgaaacataaatgaatgtcatgtttagacttgggtcccatccccaagatatcttattatgtctatgcaaatatttcaaatctgaaaaaaaactcctgtcccaagcaatttgggtagggaatagtcaacctgtgtatcatgaatacacatatactgacttctgtctaacaaaatggaaatgggagataaaaaacatcgaatggagaatgtttgttggttttttggtgtggcttgttttgggattaaagtataaaccaacttagccaatattctcaagtagctgaaaatctgtagggctcagctactttctggatcagtctcattgaaaatgtatcctccatttaaacttaatttatttgcaaaaatgagtttagggcctttgaaaagtgctaaatgattaagttgtaaaaatataaggactgagattctccctttaagggtcacagcagctgtttgaagagatgcaggcatctctcacagtttagctagatgacttaaggaaaagtttcgtttgattcttcctgatgctgtcttttcccctagaatagggtagacagtattaggagtttagtaatcatatgtgttaggatggtagtagggacacaattgtcatccacctcacaggagattgtttagtagattaagtgagataacaaagatgagatgctggacacccagtaggtctgggttttgggggttttattttatttatacatagcaggtattggcaagcatattattttaggcttggcgggccataccacagtctgaaagcatcagtctgaaacactgaaagcagccgcagacaataatatctagatagatggatgtggctgtgtgccagtagaactttaggtacaaagggccaggtgtggtggctcatgcctgtaatcccaacactttgggaggccgaggcaggtggatcacctgaggtcaggagttcgagaccagcctggccaacatagtgaagccccttctctactaaagatacaaaaattagctgggtgtggcggcatgaacctgtaatcccagctactcaggaggctgaagcaagagaaccattgaacctaggagaggtggaggttgcagtgagccgagatcgtgctactgcactccagcctgggtgacagaacgatactctgtctcaaaaaaagaaactttatgtataaaaatcggggacaggcaaaatttggcccacaggccataatttgccaacctctaatctatataaataggtaaatttctttatgtctggtatttcccttgacttttcttaaagggataaaagggaattttcagccacttttttactatagttccaagttcccatactgcacatcaaaataatacttgaaggtacaaatatgtacttatatattttgaactatatgcagaaaaaatgtaaaattacagtgctgaatgtattcatatgttaatttttagataaaatagcttctgtcacatgaggtaaaatgatgtgacattttgaaatgtcaagttttctcaccatactttgtctcaaatatgttaaattacaaaataatacacgtagcaaattgaatttttgaaccaagataaagtaaaaattaaaacccttataggagaatttattgttcacaagtgaaagaaggaatactggggaaaatagaagagcctcagaaggaaaaacatgtaaaatatgatgaaagcaatatttaatgtaaacgttgaaaagagcagtagagaggagtggaaaagcatccaggatttgtcatcaaaagctcaaaattccggtgccagctctggtctctacaggtttgtgacctggggcaacttacttaattgctctgagcttcagttttcccagtactgagtggacagaataatatactttatatacattgttttagagtgttaaagaaatgtgtgaagtgctttgccctagaactttccattgctataaatactactgtttactgtccacataacagatgcagttccctacatccatcctgggtgatctgaaactgccttctgagaagcgtagttggcctttccagggcaataggacttaagaggacctgtagcttgtctcagttacccacacattggccttggctgtcatcccagcctttacaggtgtgcataggtcaaatgttgtaactctttactcagaaaataccacgtgacctatagccccctatggtcttcccatgcacctgtatggctgatccgacgttcctggttcttgttcacatgggatatagaccacatccatttattatgccctgttgactcaagaaagtaaaagctacaaccatggggcagaaggcacagtacccctgtaacacggaatcccaggccttcttaaagggcaacctacagactgtgagaacaagaactcaacaacagcccccagcaccctgagggaagaggcaggcagaggccaggatgagggcgtcggagggagggacggagagagacagcgatgaagaggctgaggccctcatctctgaccactcccaaaggtcacataggcactggatggtagaggcagaaaataagccctttctctttccaagtctctgccctgcctcatgcaacccatggatcctctgactctgaagtgggcagacgggcaccctagacccaaacttgtgactgccccaaggctttgtaaccatggggaaaagaaagattgcagtctttagttgaagactttgcattctctgtgccctcggttataacaataggtttttagaaaaatctgtcttagggtcaatttatagttcttcaaagtaagagctgaggcttttgttgacagtcaactgggtcttacctcctggtggttgcatatggcatgcattaataaatgaattctaaaaccacacaaatattactgaatatgttcaaactaaaaagcaacacagaaaagtactggatttatgattcatcacaataaatttatcagagaaaatggtgaaagaggaaatgtgtgtctctaaaacagatttggattttatttatttgggacatataaaagaggaaggaagagttgataaagaattcttatttgactcttcaaagtcactgttcaccagaaattcagagaatcaacatacaaattacaatggtagtttgttttctggaaggccagtgaaatacagctccttaatttataatgaaatttactttctaacaaattaagtctttctaatgagaccaacattgagaattcagcccttacctcgggatggtctgagaaaaccaaaaggccaactgttttattgctttagatcagttaggtgatgataactatgagcatttataataatattttaaattggccctgagaggcttgaagacatagaactgaatgtactgccagatatttttgcaggagtcacagatgtaaaagagaattctgcacacacatccccctccccagcacccaaatgcagcatattttcagttaaatcctctggaatggactatttttagagaaatggcagggggaagggtggctaggaagcatgttcttcacaacctttttcattatgtactacaaaaaatatttacgttttaatttaatcacgacatgtgctgtactgtggttcaccctactgagagtgaaataccgagttgaactaccatttcatcttcttcaagcaaactgcaaagtttcgcctactctgaaatttgagagttaacacatggtacccaggcctgggctaggcttggcaaaatgcaaaatgcaagcaacattgctcaacatcacaccctttcactgcactcacagcccatcttgtgcataaaataatgtgacagcctggttcattagtatttttcatgtaattttaagtaccattataggtttcaaaatttgcaaaaatagaaaaattattttacttctactcccagtataattattttacatattatcttctagtctgttttataatatttattttaaattgaaatcataaaacttttttttgctcttagccaaagaatgtcggcaaactctaatggtcctcattcccactgcacagcatttcagtttgactttacatactcaggggaaaagaaggcagcttggttgagaaactgcaagatcccaagtgcctgttttttgtcttttgtttagtcttgtttttttgttttttgtttttttgaggaactaatgaataaagcacacaaaatctccgagcagtagctggcctttcaggggcacgctgcacagcagttctggagaggacagtatctccaagggtgggtgagttccccattgctcagaggaatcagccaaggggcctgcagcggaagctcccaggctgagctggaacttgaaaccaggtctgtctgcctctgcaccttcaagccaacaagggcataaggcaatttgcctctataaatgtagcatccaacttatttcacattctgtgctcagtagaacagtgaccatttagaaacactggtaacagcataaaaacaattattctcattcactctaacggaaactaccactagtacagaattgaaaaatacaagtaatactttcatttgaggcatgagcatttatctgtcagcttaacttgtgagaaacctggctgtcatgataagtgtctgtaatcaggagttaggcaaattaatattatttgcatttttttatgtctagaaaatatttataaacaaaaagccagtcatctgagactctaatgaaggaaggaagtcaagacaaggaagtgtttccttgtctcctcctgcttttgttgactgtgtgggtagccaggaaaggactacagtcttctttataggagggggatggcagcagaagcaacaggaccatgaaccaaggagaatgttctcacctgctgctgttggacctccaggccatgccatctgatgtgtataagaggatatggaaagatttaggttttttctttttgaagactagatatgcaaatgattgaaaaaaaaaaaaaaacaaaaaccaagcatggtggctttgggaggccagggcaagaggattgcttgaggtaaggagttcaagaccaacatgggcaacctgggcagacactcaggaagtgggggtgggagatactgtttactgactgcattcctcatcaccctcagttaatgtttattaggtatactcaaagtacagggcagtattatggcttgaaaaaagcataatgaacttaataagttaaaaataaccttgaggctgagcgtggtggctctcgcctgtaatctcaacactttgggaggctgaggtgggcagattgcttgagcccggggttcagaaccagcctgagcaacatggcaaaacctgatctctaccaaaaatacaaaaatgtagctgagtgtggtggtgcatgccaatagtcccagctactctggaggctgatggcagttggatggattgagcctaggagattgaggctgcagtgagccaagatcgtgccactgcaccccagcctgcgtgacagagtaagaccctgtctcaaaaaaaaaaaaaaaagaattaccgtgactcctgtctagttagatcctcaatgcaactttgaaaaacaacgaaaaaagggccgggcatggtggctcatgcctgtaatcccagcactttgggaggccagggtggatggatcacgaggtcagagttcaagaccagcctggccaagatggtgaaaccccgtctctactaaaaatacaaaaattagccaggcatggtggcgggtgcctgtaatcccagctactcagcaggctgaggcagagaattgcttgaacccgggaggcagaggttgtggtgagccgagatcatgccactgcccagaagcctgggcgacagagcaagaatccatctcaaaaaacaaattaaaaaaaaaaatgaaaaaagaacttttccaaatacaaaagtgagaaaggaaacttaatattctgactcactgaattcttccagcggaaaacctccactctatagagaccctgaaattagtaaggatgttcattaaagccattgtgtttttttagcgtcatgcactgcactgcccaagagccagaggacaccctgctcacctggtccaggcctggctgtggtacccctgcccaccatggctgagtgggagggcgagctgtcattgagcagtgcaaactactcccctggctcagagcctgtacccacaccatcctctcacgcctgggccaggcaacctttgctgacttagcttccacagaacatttgttttctgctttgtagtgtactgcctccacagaaatgaatggagaattgaacagctggagaaagtttttcaccatccagatttcaccagtgcatctcatttatctggctgtaatgatcgatcacctggccccagtaaagcatttgtatgatcaagtaacacttttcttgaaaatggagtcctaaagtttgctgtgttgtcagttaaaagaactgtgggttgggggaaagggagatggttaatgggtccaaagatataaagatatagttataggctgagtgcggtggctgacacctataatcacagcactgtgggaggccgccaacatggtgaaaccctgtctctacttaaaaaaaaaaaatacaaaaattagctggacatgatggcacatgcctataatcccagctactcgggaggctgaggcccaagaatcgcttgaacctgggaggtggaggttgcagtgagccgagattatgccactcctctccagcctgggtgacagagtgactgtctcaaaaaaataaaataaaataactaaaagattaaattggcttatttgtaaaacaatgaaaggataaatgcttgagggataccccatctaccctgatgtgattaagtgttgtatgcctgtatcaaaatatctcttgtacccccataaatatatacacgtactatgtaccctcaaaatttaaaaaaaataaataaactgtggaagaactataaccaagcatcaaaaaacagattgccctggccaggcgcagtggcacctgtagtcccatctatcaggaggctgaggtcagagaatcacttgaagcaagagtttgagtctgtggtatgctatgatcatgcctatgaataggcagtgcactccagctggggcaacatagcaagaccctgtctctaaaaaaaaaattaaaaaagaacagattaccctaagaagaggatatttgggtgaaggtgcttctgacctctgggaggaaggagaaagctgacatgcttacctgcttcccagtgggtgaaaattgggcagacatacatgttggctttctgtgtagccttggataaggagacccacccacaaaggtaactatttccttatatgtagagaactttagtcagaaaagctttgcagtaatttgtgaatgctatacaggcatggctcactttattatgcttcactttactgcactttgcagatagagcatttatttactacttgagggcttgtggcaaccctgcatcaagcagttctatcagtatcatttttccaacagcatgtgttcacctcatgtctctatcacattttggcaattctcataatatttcaaatcccttcattattattatctgttatgatgatctgtgatcagtgatcttttatgttggtattgtaattgtttcaggacaccaccaaccacacctatattggatgccaaatttaatcagcaaatgtgtgtgttctggctcctctactaactggctgttcctccatctctttccctcttttgtgacctccctattccctgaaacacaacaatattgaaattagagaagtcagtaagcctccagtggcctcgaagtgttcagatgaaaggaagagttgcacatctctcactgtaaataaaaaactggaagtgattaagcttagtggggaaggcatggcaaaagccaagacagatcaaaagctagacctttgcattaaacagccaagttggccaggcgcggtggctcatgcctgtaatcccagcactttgggaggccgaggctggaggatcacttgagcccaggagttcgagaccagcctgggcaacatagtgagcccacatctctaagaaaaaaataattagccaggtgtagtgtagtgcctgtagtccctgctacttgggaagctgaggtggaaggatcacttgagcctgggagttcaaggctgcagcgagccatgatcgtaccactgcactccagcctaagcaacagagcaagaccctatctcaaaaaaaaaaaaaaaagagattgtctaaaattgcagctatttggaaacatttactagtgacagaacagtaagataatcatgcctgtcgtgagagtactgttccttctgagggtattgattaccaaatctcaaccaggagccttggcaggagggtgaggggtcctggaattgacagacattcaccattgtcttcgtagactcaaatagtatgtccaacacaaatatattctacttttggaaagcacatagatgtgattttttaattaactaaagtatgtactttattcgcatttccttagtgtttacctagtgttacctaattatgctccaggatcccattcaggacaccacattatactcagttgccatgtctcctcaggctcctcttggctgtcacaacttttgagacttctcttttatgactttaacagttttgaggagtgttaggtattttgtagaatgtccttaactgtgcccaatgcggtggcttacgcctgcaatcccagcactttgggaggccaaggtggatggatcacttgaggcccacagttcaagaccagcctggccaacatggtgaaatcccttctctactaaaaatacaaaaattagctgggcatggtggcacgcacctgcagtcccagctactcgggaggctgaggtgggagaattgcttaaacccaggaggcagaggttgcaatgagccgagatggtaccactgcactcaagcctgggcgacagagcaagacgtgctctcaaaaaagaaaaaaatctccttaactggaatttgtctgatttattacatatgatgagattggagttatgtgagttacgtgttcttaggaggaaaaccacaggataaagtacagttttcatcatgtcgtatccagtgtacactctgtcaacatgagttcctgctgttgatactgaccttgatcacctccctgaggtagtacttgtcaggtttctgcactatgaagttactgtactttttcctcctttccatcctaaagtctttggaaggaagccatcatgcacaatgcacacctaaggaacagagagctccaatccccttgtttgatggtggagcagttgtttggaattcctctgcatgtgagatttgtctcttctctactttttttttcaattatttatatcactatggacttgtacatatttattttacactttgagttataatccaatactattttatttattttgttgttcacattgttccagtttttttcccttggagttatttcaattgatatctgtatccctttgatatactcccataattttgagtgttctgttttgttttgttttgagtacttctttactccctgtcactgtaagatgtgctaggcttatcttgtatattttctgccttcatcctggaatcagccatttttccaaggagacctggctcctttttttcaagaatggtattagataccaagaggtacaagaagatgaaggaaatacaagtgcaatttatttatttatttaaaaaagagacagggtctcactattgcccaggctggtctcagactcctgaactcaggtgattcccttccctcagcctcccaaagtgctgggattacaggcgtgagccaccatacccggcccaaatgcattttattgcatagagttgatactagcattggtagtcatggccagatagaggctttagaagtatgaatgctcggttgtggaatgtttgatatgtacctcttgctactgggagagcttctatagccccaggaaaagatccttttctcaaaactgttctatagatagactttatttagttgtttactaatttgctatttctttcctgtcgctcatttttcagtatcactggtatcctatctccatagacaatacttttatcatttactgccttcctgaagtatttctggaggagatagtgtgagaatttctgtcagcctcagtaactccctgtgccattccagatccctggtgggcctcacttttcctttatctcctctccaggcttcttaactacatgccagcattatcacatactctaaatcatttcaggatatcatcggcatgaacggttcctattcaaaataaggctctctgaatgatttaccattctttttatgagtctctggtgcctagataccatggtttctgtgatctgtgatgatggtattgaaagaatgtgcattctcaaatacttcttaaaatattgtttggctagataggaactaggtattttaactaccaattgtcaaatagtaaaagctttcttttagcctcagaatttctgtttttataaaagtttggtatgctagctaaggagtgttctagttatggttgtctttggtgaaatgacactaacagtacatgggagggaaggtggaatcgtccacgtgtgctcctttgttgtatgtgtggctcccatggagaagttctgtagttcttcacacattataaaaagtgttttgttgcataagtcataacaatgaatatatattaaaatacctcagtgcagcaaattaattaagtctgctctctagggatttctagactaggtaagtgaaatggttcactccttatttcacttgtctctcagagagatacattatttctggacaaaagtggacacaaaattgttggatttgttcatgattttgtttttgacttttagttgtagttgttgatttatctagggaagagtgtatggcgttcctttaccctataacttcacttccacgtatcaaatattagatgtggaatcttcatattcgactacatattgaatgtttcaggcccagtgatgaatcttttctatccaacttaaacagaaggagatttattggccaggtgcagtggctcgcgcctgttatcccagcactctgggaggccgaggcgggtgggtcacttgaggtcaggagttcaagaccagccaggcaaacatggtgaaaccccatctctactaaaaatacaaaaattagccgggcttgatgttgcacatctgtagtcccagctacacgggaggccgaggcaggagaatcgcttgaacccggaggcagaggttgtagtaagccgagatcgcaccattgcactccagcctgggtgacaaaaaaaaaaaaagagagatttattaatggattttaagtggcttttaagcaatactgccatggaagctgctgcctcttctattagtacaaccagaaatatggcaagtcagctcacgtgcatccccagagccacagccgacagcagggaactgcatgacccccagagctgttgccttccagctttcgaaccacttagtgtgggctgcaagctgaatcaacacactggatgccccattcctgccatttaatgctgcagagctattggccaacaccctgagatcttttgttaatgttatgcctgctggcagaagtagcacagttaggccctctgctctgattgacaggtcccaagtcacaggggaacctgagttgggtagagtttgctgaccggcctctggagttaggaaggcccatagaaggcgattggactccttcgtacccaccaaaagagttagaaagaactcttaggaagagagaagtaaaaacatatgatcaaagcagacaataacaacaaagtcccacagtcctaaaatttcattttagaatgccattagctgtagaatgtagcatataaaaagagagagggtggcgtgaggaaaaaatgttttgtcctttaacttaatgttctatctttctaaaagaattcaaagtccaaatatttttatatgtattacttggtagtaagtatgaaaagtataaaattttatgctatggactacaaccattgaactgtgattttttgtttgttttttgttgttgttgttgtttttgagacggagcctcgctctatcgcccaggctggagtgcagtggcacgatctcagctctctgcaacctccacttcctgggttcaagcagttctcctgcctcagcctcccaagtagctggaactacaggtacacactgccacacccagcttttttttttttttttttttttttttttttttttttttttttttgtattttggtagagacggggtttcaccgtgttgcccaggctggtctcgaactcctgagctgaggcaatctgcccatctcggcctcccaaagcgctaggattacaggcgggagccactgcgcctggctgagctgtgatttttaaaaggaaatttttaattagatgctgaaaaagggtatgcatatttgaggtacactttaaaatgtttttaaataagcaaatgttaatgcaaatagatattgcaaacactaagaaattaaataagactaggtaatttttaatttaattttatttagagacaggatctcactgtcacgcagactggagtgcagtgacatgatcatagcttacggcaccctccaacccctgtcctcaagccatactccagccttggcctcccaaagcactggtgatacaggtgtgagccactgtgcccagccagactaatcaattttgacttttctctgtactacttgctatatccaagcatgaacttgtgttatttttgaatattttttatttctgtgatgtaagatttgttatagattcattcctgctttatatctcaagcaagattcaattcgatgcatttacttagtagagtgcctactatagatgagacgttttaaaacagtatggccattacaaatatatgtttaatgatagtgagtagtaagtgcttaaagtaataatgctaagctttaacagttcttgaaatttaagtaaaaggtagtggtactaacacaagcatgaaggaatgccacatgtggctggagtgctgctgggctcccctgcagcctctcaagggaggaggatgaacactcaagggatggaccaactgaagcagggaaacttggccacttactgcctgacatagaagcccagctgactgctgcatcttacccagcccaccatgtgtaagaactggttgagacgacattgaattccctaaacttctgggtgctcagtggtgaactgagatggaatacctgccagcagctgggcagaggaaagaaagccagcactctgggaaggtaggcttcacctacttacatcctaatggggactcacagtggcagcagagctgtgcagagcctcgggccctggcatggtattccagccagagtggactctgcgcacgtgtgggagcagccctggcattcaaggatttgcattgaaggccttggttgaggatgctgtgaaggtggccactgtgtgtatggagcagtgactttatgggtcaagaattcgacatgtggctgggcacagtggcagacacctgtaatcccagcactttgggaggccgaggcaggcggatcacgaagtaaggagatcaagaccatcctggctaacacggtaaaactaaactaaaaatacaaaagttagccgggtgtggtggtgggcgcctgtagtcccagctactcgggaggctgaggcaggtgaatggtgtgaacccaggaggtggaggttgctgtgagccaagatcgtgccactgcactccagcctgggcgacagagcgagactccgtctcaaaaaaaaaaaaaaaaagaaaaagaattcgacatgtgcttgctatgtgaggccagtgagtgaacccgcactctgaggctcagcatttataggtcaagacagcccgctgacttctttgggacctgtcataaactcttctaaagtgttaatgtttttcgtatgcaagaaagctcaccaataaaagaggaaactttagggaaggttgaaaagcaactgtggactggccacggtgatttatccctttaatcccggcactttgggaggcaggaggattgcttgaagccaggagtctgagaccagcctgggcaacaaagtgagaccccgtctctactaaaaatttaaaaattagctgggcatgatggtgcacgcctgtagtcttagctacttgagaggctgaggcaagaggatcgtttgaggccaggagctcaaggctgcagtgagccatgatggcagcagagtgagaccctgtctctaaataaataaataaatggaaaaacaatgggatttgatagaaggcaggaacatgtacaaatattgcaaatttttgcaaatttgggaaattatgaagatcttaatcatacatatggattctagcatatggactgttattgattgaatctggattattttagttggttctactttgttctactgcattgaaaatcattgttagtatatttagtcttctcagctaacatcttatacctagataactgttgaggtttataaaggccttaaaacatgaataatacttacacaactgtgggatgctttttttttaactgaatgtattgtaagtcaaattcagtccatatctaaagtctgaaaattttaatattcagatgactaataggtataactctttaccttctagtctgcattctgtagtatttgccatacttctataactgcaacttctattttatttattttaattttttatttgtttgttttgagacagtcttcctctcttacccaggctggagtgcagtggtgcagtcacagctcactgcagccttagtctcccatgctcaaacaatcctcccacctcagcctccagagtagctgggacttaaggcacatatcaccacacctggctagtgttgttgttgttgttgttgttgttgttgttttctagagacggtttcatcatcttgcccagcctgctctcaaactcctaggctcaagtgatcctcccaccttgacctcccaaagttctgggattacaggcgtgagccattgtgcctgaccgcaacttctattttagagaaagctgcaactcaataattagtggaatatttcctatgtatattatatacacaaaaaagcatttgccatgaaaaacctaaactgtgtattcaaaagctttaatataaacagtattattcaaaatggaaagactttcattcctgccctcatgaaatagaaattcagctatatttgatcatgactgtagaatattactagagattgggttttttatgttatgttttgttcaagtagatacacctttttgaggtcattcatatagttagtgacatgtaaatgctttttaactacactgtttaaacagtatcaacagaggcttcgagtgtgatgtttacatttctggaacttacgggctgtaccctcagtctgtcctggaacctctgcattccaccctcagtctatcctggctgctgtgaagatggagtgctggtggctggtcgttagcagtcactccacctcacacccaagtttagccacatggccaagccagtcctgtggtgtttatcaaggaagaagggccctggagattgcaggctccactttctgcctccccagccatccctttacttgcatacctggcaggaagggttaggtaggacagccaagcacagcataaatctgaacggaagctgatgtcaggtctctctccttcttagctgtgccccacagctgtgccccactatcacgcaagttgtttcatgtggcacattctgtgatgatgacgtaatcgtgttaccttcatttactgagtgcttgctaggcattacaaaattatgaagcacctcctcgtgttgggtttaggaatatagagcaatgaacaaaacagacaaggggccggctctccagaataaagtaaataagatcattttcaattggtttgtagccaggtaaccttggacaaattaccttatactttacttttctcatttgtaaaatggaggttatgatggtatctccttatgtgattgatatattaatgagataatactcaaaaagcacttagaacaggtcctagtacatggtgaatgctaagtgctcaaaaagcactcccaattattatgagacataatactgtgtgccatgatatggagtaacctggataggagcatcaaggtcaccttggaatgagcagtgaggggaagctgaagagggagagcttcaaggtgaaacctaacggatgaagtggagtcagccacgaaaagctccaggagacacactttccatgcaaagacaccagctattgcaaagaaaaggatggacttgctgtgttctaggagcagaagagaggccagtgtacctgggatgtagagatgtacccaggggctgagacagatgattagcacacagaagagccaggtgccagaagtttagacttcattccaaggacagtgagaagcctttaaggttttcagcatgagatacatgtgatccaatctgtgctttgaaaagatcactccagctgctccagatcaaatggaatgtggaggtacaagaataggaacaggaaacaagttaggctatttcaaaaatccagccaggtcagactgacgacctggaccagagtgcttatggtgaaaagcagaaaggctcagggtctgttttagagatatggtttacagtaacagctaaaaatcagatgtgggatgataggaagtgggggctcaaggatgactgtgaggttgttggactggtggtggtgtggtcattgaggtgaggggtgactgggggaggccagaattctagtgatggccttgttgaggtggagacctctaagacaccaagctgaaggagtcaaattggatatgcgcttaccgtggaggagagaggtaagcacgtgaaggccaggcactggacccgggaaggaattatcttctctagtctttataaaaacactgtaagataaataacatctagctatgggaaacagaaattaatgaaagccactttctaaggttaattttaagttaaaggatttttttcaccttaaagtagtagataaaccagtggaatagagagtcccaaatatatacaggaacttagttaataatacatttcaaatcaatagggaaagatgaaccattcaataaatgggtaaggacagtaggttagccatctggaaaaagaaatgaattcgatttacactttaatcttacaccaagataggttacaaatgaatcaaagatttaaaaactgaaatcgtaaaagttctagaagaaatagtgggagaagtatcttgaggtggaagttttttcttgatttttcaagatttttcttgattcaacatccatggatccaaaagaaaaaattaagcctacatgacaaaattaaaagttaaatggcaaattgagaatatatatgtatgatttgtattacaaagagccactctttctagtacatgaggtactcatagaaattagtagggaagactgacaactcagtataaaaatgggcaaagggtatgaatacacagttcataaaaggaaaagatgctcaatgtctcatgataaaaaatatgaattaaaataacactattatttttcccctaccaattttgcagaaatctaaaattttagtaacttttgtttggtgaggctgaggggcaataaacactcttcctttggtggagggagagtacattgtcaccactccagagagagcaccttggcatgtgtatatacagatgtgtgtgtgtgaattttaaacaggtcagctctttgacccagcacttctacttcttggaatttatccaacagatatacttgtgtatatatgaaatacaagcttattccttgccccattctttgtgatagcaagtggaaatggcctgaaggtcagcattaggaaattaaaaattatggcacgtgctcatagtagaatactatgcagctctctatatggctacaagaagaatgaggaaacaatgaactgtcacagaaaaatctatgacattggttacattgaaggaatggtgggatgcttgaaatgggctatattccttgaatatatagagagaaacttttgaagcatatgtgagaaacaagtaacagtgattatctgtgaggggtagctgggaactagaggatggaggacgggagctggacagagggaaatttgtcaccatatacctttaaattttgaattatatatattactcagaaaaatgaaaggactttatatatagttatttatcttgaaatgtttagacgttatatatattttggaaagcagtatatacagcaataatgttatactctttgacccaatactccctagaaatttaattcatgaaaactaaacaaaaactacacataaacgctgttcttcttcatggtagcaatacctataataatggggaaaatagaagcaacctaaatgtcagtgtgggggattatttagttgaataatatgacatacagcttgatataatgttaagcaactgtgtaatataattaagaagaccatgctgaaacatttatccattcaacaaatatttattgtgtgcctactgtgtttcaagcattgttctaggtgttagggatacagcaagaaataagggccaaaataaataaataaatccatacaccattggaactgccattatttgggggaagactggccacagaccaatagatataatgtaagaaagtaagcccaggcgcagtggctcacgcctgtaatcccagcactttgggaggccgaggtgggtggatcccctgagatcaggagttcgagaccagcctggccagcatggtgaaaacctatctctactaaaaatacaaaaattagccaggcgtgttggtgcacgcctataatctcagctactcaggaggctgaggcaggagaatcgcttgaactcaggcggcggaggttgcaggagccgagattgcgccactgcactctagcctgggtgacagagtgagactccatctcgaaagagagagagagagagagagagagagagagagagagagggagagagagagagggagagagggagagagagagagagagagaaatgatggttacaacttcaaataaagcaagataagggacagtgaaggtggagggctgctatttttacataagactcaaggaaagtctcactgacaagttaatacttgaatggagatgggtgagtaagtcatgtaaatgtgtagggagagcatctcagcagggagatctggtacttgaggatgcaagaagggatctgtttggcatgtttgtggaatgacaaggaggccagtgtttctgtgcatcacatacatgaaggtcagagaggtagaaagggtagggttgggactctgatcgtgaggaggtctagaaagccatgataataaggcctttggattttattccacgtgtgatacaaagccattagaaaatctggaacccctgtagaagtgattctaaatgactgtgtgagaagcaagagagtctgagtcctccattagggcaagctggtggataaagacatggtgcagaactggagatatccaagaggtagaaagttaattcaacttagcactctgaatgattggatgtgggaggtggagaaaagggagggatccagaaggattctaaggtttgggcaacaagatgaatggtgataccattaaacgagacagaaaattcaggagggagaacagagttggagagagctgagatgatggttttaaacatgttgagtttgttgagggacctgtgagtcacaaataccaaaagggagaaaagtaaaatgaaccctgtcatgtttgatcagaattagggtagtataaactcgtacttttcaagatggatgggtgaatgaacagaagtcagtgtctgtttgtgtgagagggtgtatgtgtgcacacacttcccagctctactaagaggctctgggacagtgatacgtcagtagcaatgagcacacctagtgccagatagtagcttctaaatacctgaagggaattggcaaagtgactgattccaagtttggatgagataaaatacaagatgagccttgaaatcttgttatgttagaaagtaagaatgttctcaaagaatgatggggacatcaaaaagaaaaaggacaccgaagctagcttgaaagagtccccaactagccaaatctggggcaattcatgcatcaaaataagggatagttatagattataaaccattcagtaagactcgatgaaaacaaatgaaaaataatttaagaaaatgaatgaattggaaatttgataaggaataggatattagacggtttcacagtatctcctacacaatgttttttaacttcaaaaggaaaaagagtaacttatagttgagaagcctgacggacatcaccttaagttttaaaaagtcagcgtcatcagtattgggacaaattaaaataatgtaattattttaatacacagaatgtaattagaagccggcccaggatgcacacctatagtcccagccactcaggacgctgaggtgagaggatcactggagcccaggagtttgaggttgtagtgcacaatgatcattcctgtgaatacccactatactctagcctaggcagcatagaaagagcctgtcaagaaaaagtgggaagaatgcaaaaaaaaaaaagcacacagcatcacttctgtgttatttttaccaatgatagatcaactgaatctcacaatgagaagaaatcagacaaacccaaaatgagggttcatgctgtacagaatacctgaactgtttccttccaaaatgtcagggttatgaaagtcaaggaaagactgaggaaccattccagactgcagagtattaagagacatgacaactaaatgcagcccgattctgaactatctccttttgctatacaggacattaccagggcaatgggtgaaacatgagtgagtaggaagattaggtggagggaagatcagggttcatgtcctcctcttatggctgtagagcggctatatgggaaaaagtccttatttgtaggaaaaacacacaaaagtatttgggaatgaaggggtatcatgtcaagaagttaccctcaaataattcaggggaaaaaaacatgatttttactgtatttagaactttttagtaaatttgagatttaaaactttttacagggatggtttaacatatacaggtcaataaatatgatacatcacattaacaaaataaaaaaacaaaaatcatatgatcattttaatagatgcagaaaaagcattcaataaaatccagcatccctttatgataaaaactctccacaaacctggcatagaagggacatacctcacagtaataaaaaccgtatatgacgaacccacagccaacatcatactgaatggggaaaagctgaaagcattccccttgataactggaacaagacaaggatgcccactgtcacccttctattcaacatagtactgggagtgctagccagaacaatcaggctacagaattaaagggcacccagattggaaaagaggaagtcaaactgttactgtctgccactgatatgattgtatacctagaaaaccctaaagactcctccaaaagacatctagatttgataaacaaattcagcagagtcttagagtacaaaatcaatgtacaaaaatcagtagcactgctatacaccaacaatgaccaagcggggaatcaaatcaagaacccagtctttcttaacaatagctgcaaaaattagaataaaatacttaggaatatacttaaccaaggaggtgaaagataaagagaaccggaaaacactgctggaaatgatcatagatgacagaaacaaatgtaagcacgtctcgtctcatctcatggattggaagaatgaccatcatgaaaatggtcgtgctgcccaaagcaacctacagatttaatgcaattcctatcaaaataccaacatcatttttcacagaattagaaaaaacagtcctaaaattcataggcaccaaaaaagagcctgaatagccaaagcaatagtaagcaaaaagaataaatctggaggtgtcatgtttcctgacttcaaattatactataaggctatagttaccaaaacagcgtggtgctgatataaaagtagatacacagaccactggaaaagaatagcccaagaaataaggccaaatacttacagttaataggtcttcaacaaagcatataaaaacatagattaggggaaggacaccctatttaatcattggtgatgggaaaactgaaaagccacatggagaggaatgaaactggatcctcatctctcaccttatacaaaataaactcaagatggatcaaagacttaaatctaagacctgaaaccataaaaattctagaagataacccaggaaaaactcttctggacatcccctaagcaaaaaattcatggctaagaacccaaaagcaattacaacaaagacaaaaataaataaatgggacctaattaagaagcttctgcacagcaacagaaataatcatcaaacagacaactcacagaatgagagaaaatatttgtaaactgtgcatctgacaaaggactaatatctagaatctacaaagaactcaagcaaatcagcaaggaaaaaagagaaagacaagtaatcccatcaaaaagtaggcaaatgacatgaatagatatttctcaaaagatgacttacaaatggccaacaaacatgaaaaaatgctcaacatcactaattatcagggaaatccaaattaaaaccgcagtgagatagcaccttaccccctcaagaatggacattattttgaaagttaagaaacaatagatactggaacggacgtggtgaaaggggaacgcttatacagtactggtgggaatgtaaattagtacaggtctatggaaaacagtatggagattccttaaagagctaaaagtagatctgccatttgattcaacatttccactgctgggtatctacccaaaggaaagtaaatcattatataaaaaaagacacctatacacatatatttattgcagcacaattcacaattacaaagatagggaaccaacctaagtgaccatccatcacacaatgagtagataaagaaaaatcactatacacaccatggaatacttctcagccataaaaaaaagaacaaaataatggcttttgcagcagcttggatggagctggaggccattattctaaatgaagtaactcaggaatggaaaaccaaatactgtatgttctcacttacaaatgggagctaagctgccagcacacagaggcatacaaagtgatataatgcactacagagacttagatgggggagagtgggagagggtgaagaataaaagactacatattgggtacactgtacactactcgggtgatgggtgcactaaaacctcaaaatctcagacttcaacactatacaattcatctgtgtaaccaaaaatcgcttgtacccccaaaagctattgaaatttttaaaaaataaataagggtcagaaattaaataaaaactttttaaaatgatcagaaaagtgagtaggaggcaatcaaatggaaatgtgaggcccacactttctcaaaggttggcaggaaggttggcaggaaagagagagtgacatacgctcccagcagagactgcactgagcatttggagccaatgtgcagagagagaagagatacacctaggctaggtggtgagcactgcaaagcaaagtcctagaggccgtgttttgctgggcacccaggtccagtggaaagggcaggctgggcaggcagcaggaggatgtcagctgggcacggcaggcagctccaaggtgggcgggctggaaacaaaactaattcctacctgggaaccttccttctctctgagaaatagagttgtcttctaaaagtggccattgtctgctgtcttaagtacagtaaactgaatatggttcgtcttcaaatttgaaattacttcactgaaaaatgtatcaaaacaatttaatatttctcagtgatattgtttctaaaacaggttttcttaggattgcagaatttacaaaattaccattgatatttgaaaaagaagaaagccttgtatgtatgcatttgccaaggcagtttgatttttttatttggtagggtcagagcaggtagaacatgtatgcatacttcacaaaaaacaggtgatttataagccattgcattagacaggactggtttccaagccagtcagtcagcttagaatgtgaaaccctgattcagaagcgaatcacctaaggatgattcaacactgtgtttcctgttgtgctagtaggcccactacagtagcagtttacccccacctcacccagttcattagactctaatctagtcccatactggaactacagagcctgaagactatataagcaactgtcttctcattctccttagactgtccatgactgatgccactcaccaggcacaggagggatgctaatccattccatggaatggagcctcagggtttacaggctttattccctccaagaaccctgcctctgaaagcctgtgtgactcttgcgtgggccaacatgccctttgatggctcaggggaagctgtaggacactaacttacccatggcaccaccaaaacttgcatccccaggcctgtgtcttgttccttactctatacccagttacaaatccttggcctctcaggtttcagtgatgaataggcatgggaaagtaggaataccaaatggcctctcatttggtagtcggttggggaatgcatgagagaaaataagaccacagtgtgcccagggatgctgagctgatggcacattttgagcagtaaactttcttagtgtagatccctccttcctcgctccctcttttccttcattgttcttgtcctaatttacaacttcactaagttcttcctttcccacttgtatactttgtagcaatatatgttttggtttgtgaactacctcacattgtccccaagggcaggaactatgtcttatgtcccttttccccaggagggctgaataaatgcctgttgattaactcaacttggtgtaacaaacatatattatctataatgcataagtctctgagctaagggctctgacatgtacatacggaataagaaataagattcctgccttcaagaaacttccaggagagagaaaagagctcctcaagttattataatacatagtaaatgtgatgagaactaaaagacaaaaaaaaaacaaaccacttttaatgcaaaggaaaaaaaggaaaaagaattgtttacactatgggaataagagaagtcttcatataagacatggagtttcagtttgactttgaaaaatgatacttagatgagtgggagtggcaaggactatcagattccatgaggggaacaggcgggagccaagacagataggggcgtggtagcagcatcttgatcttcttaggccccaccatgtgtgtaccaagaggcatgcaggagccattgggatactcccaaagttctctggccaggtgagtgacatgattaactctattcgataagaaggagcactgtagcagcaacctgcaggaggggttagaagaaaggaaagaacagggtttaagagacaggttgggaagcacctgcctaatccatgtaggtggcaggaagggccacaagcaaggcaagaccgtgacaatggggatgaggaggagaatattaaaaaggtgatgcggagggaaaatagacaggttacagcaactggatgtgaaaggaaatagagtacttccaggttttgagactcagtgactgggagaacagtggggcattcttcaagagggatctctgcataatgatggtaaagtaacagatctagagaaagagagatactggccagttacattagctctgtattcattggcctaaataaatgcagcagtgattttattctgtgtaccctacgaaatatagatgcactcatataacactttgccaatgataaactaaaactctggttgatcctcttgagaaggtttagactcttttctttcttaaagacctacactcatataagacattatcttttaatacgactggcatgatatatatgttctttttttatatatactttaagttttagggtacatgtgcacaatgtgcaggtttgttacatatgtatacacgtgccatgttggtgtgctgcacccagtaactcgtcatttaacattaggtatatctcctaatgctatccctcccccctcctcccaccccacaacaggccccggtgtgtcatgttccccttcctgtgtccacgtgttctcattgttcaattcctacctatgagtgagaacatgcggtgtttggttttctgtccctgtgatagtttgctgagaatgatggtttccagcttcatccatgtccctacaaaggacataaactcatccttttttatggctgcatagtgttccatggtgtatatgtgccacattttcttaatccagtctattattgttggacatatgggttggttccaggtctttgctattgtgaatggtgccacaataaacatacatgtgcatgtgtctttatagcagcatgatttataatcctttgggtatatacccagtaatgggatggctgggtcaaatggtatctctagttctagatccctgaggaatcgccacactgacttccacaatggttgaactagtccacagtcccaccaacagtaaaactgttcctgtttctccacatcctctccagcacctgttgtttcctgactttttaatgatcaccattctaactagtgtgagatggtatctcattgtggttttgatttgtatttctctgatggccagtgatgatgagcattttttcatgtgtcttttggctgcataaatgtcttcttttgagaagtgtctgttcatatccttcgcccactttttgatggggttgtttgtttttttcttgtaaatttgttggagttcattgtagattctggatattagccctttgtcagatgagtagattgcaaaaattttctcccattctgtaggttgcctgttcactgtgatggtagtttcttttgctgtgcagaagctctttagtttaattagatcgcatttgtcaattttggcttttgttgccattgcttttggtgttttagacatgaagtccttgcccatgcctatgtcctgaatggtattgcctaggttttcttctcgggtttttatggttttgggtctaacatttaagtctttaaagatatatatgttcttaaaaaggcataatgccttacatttttggtccattgatttttgacatgggtgtcaggcaattcaatggagaaagaagagtcattccaatcaatggttttggaatgactaggtatccacatataaaagaattaaggtggacacctgcctcataccatacacaaaaattactgcaaaatgaatcacagatctaatgtaagaactaaatttctcagaagataatgtaggactgtatcttcctaaccgtacatattaggcaatggtttcttagatgtgacaccaaaatcataaacaacaaaagaaaaaatacataaatgagacttcatcgaaattaaaaactttaacgtctcaaaaaacaaatttgcaaatcactagtctgataggggacttgtatccagaatatgtaaagaacacttactactcaacaataaaaagatacccaaataaaagatggttaaaaaattcaaatagacatttattcaaagataatgcaaatggacagtaagcacatgatgatcaacatcattagatactagggaaatgcaaataaaaaccacagtgagataccacttcacagtcactaggatggcaataataaaaagaaggacaataccaagtatggataaattcaggatgtggagaagttggaatcttggcacactactagtgagaatgcaaaatgttgcagccattttgagaaacagtctggcagttccccaaaaagttaaacatggaattaccatataacccagaattttcactcctaggtatatactcttgagaattgaaaacgtatatccatgtaacttctacagagtcactccatggcaacattactcacaatgcaaaaatgtcaaaacaactgcaatatctgtcagctgatagaagataaataaatgtgatatatccatgtaatggaatatcattcagcaacaaaaaggaatgaaacactgatccatgctataacatgagtgaacctagaaaacatcatgctaagtgaaaagaagttagacatagaaggccacatatcatatgagtccatttatgtgaaataactagaacaggcaaatccatagaggcagaaatccaatcaattgttgccagggactcaggggaggggagaataggagtaattgatggatggaggtttccttttgggatgataaaaatatcctggaattagatagtgctgatggttgcagaacattgtgaatgtacttaatgccactgtggtacactttaaaaggattaaaatggtaaattttatgttatgtgtattttgctacaatataaacaggtccattctatggcatgtgaattatacctcagtaaagctgttataaaaataaaaggcataatagcttgttttacttaccagggaattgtgctgaggaaaaaaaaaatccaatcccaaaaattgtatactggatgattcaatttttgtaacatttttgaaatggcaaaaattttagaagagaggacagatgaatgtttttctgatgttagtcatgagggttgggagatggaaggaggtgggttattaaagggcagcctgagggacccttatggtgatggaactgttcagtattttgactgtggtagaaggtacaggatcctacacaggtgataaaactgtatcaaactaaatatgtgacacacatacaagtaaaagagtggcaggttttaacaatgtcaatatcctagttgtggtattgtactattgtttactagtacatatagtttatactattggggtaactgggtgaagtgtacaggggttctctctgtggtatttcttaggactgcatgtgactctacaattaactcaataaaaatttcaattaataaaaaggcaggcttgaagcaatggctcttgcctccaatcccagcactttgggaagccaaagcaggaagatcccttgagcccatgagttccagaccagcctgagcaatatagtgagaccccatttctacaaaaaatttaaaaatttagctggacacggtagcacaggccttagtcccagccgtttgggagactgcagtggaatgatcacttgagcccaggaggttgaggctgcactgagccgtgatcatgccactgcacaccagcctgggcaacagattgagaccctgtctcaaaaaaaaaaaaaaaaaaaagaaaaagaaaaagaaaaaaaaaggcaaaagaggtatctttgaaaacgtgttccatgggtaaatgtctatcaaattatacgacgtcttggccgggtgccgtggcttacacctgtaatcccagcactttgggaggccgaggcgggcggatcacctgaggtcggaagtttgagaccagcctgaccaacatggagaaaccctgtctctactaaaaatgcaaaatcagctgggcatagtggcacatgcttgtagtcccagctactcgggaggctgaggtaggagaatcgcttgaacccaggaggcagaggttgcagtgagccgagattgcgccattgcactccagcctgggcaacaagagagaaactccatctcaaaaaaaaaaaaatagttcgatattcaccggcaataaacaaatcaaagtccagactggcaccagttgtgtcagcggttttatttgtgtcttccttaaagaccaagcttgcagcagggttttgttactgttgttgttgttgttgttgttgttgttgttgttgttgttaatctcagcagcacaatgtttttctacaataaagatggtgtgtgagtatggaaaaggcctttctcggccagacttggtggctcacgcctgtaatcccagcactttgggaggtcgaggccagtggatcgcctgaggtcaggagttcgagaccagcctggccaacgtagcgaaaccccatctctactaaaaatacaaaaaattagcagggcgtggtggcaggcacctgtaatcccagctactcaggaggctaaggcaggagaatcgcttggaccggcgaggtggagattgcagtgagccaagatagcgcaattgcattccagcctgatcaacaagagcaaaactccatctccatctcaaaaaaaaaaaaaaaaaagaaaagactcttctcagcgccgcacagtggcttacacttacagtcccagcacattgggaggctgaggctggtggatcacttgagtccaggagtttgagaccagcctgggcaacatggcctagccccgtctctaccaaaaatacaaaaattagctgggcgaggtggtgagtgcgcctgtggtcccagctactctggaggctgaggtgggaggaccagttgagcccaggagttgaggctgcagggagccgagatgacagcacggtactccagcctgggagacggagggtggccttgtctcagaaggggaaaaaggctgaggtttttttccctcttcttttggttgtcacttttagcaaagtaagattgttattcctttcggttcattgatatttaaaagtttacatgtcacatttttatttcagcaaagagaaaatatgatttttaaatgaataaaaaacatttctgtgcagtagaagtcgtgctaacatctcatgttaaaaagataaacaacaggattaactgtttactttgggagcgcagaggctggttgttttttgagaagaagaacacaatgtcctgctgtctctggtttcccggtcggccctcctcccaggcggctacaggagtgggcgaggcccccgcccccaatgcgtccccgcccccaccccgccccgccctcgctctggcccttctcgcccccgccttttctcagcggctcccttgcgctcaggttccagccctcttctgtccccatgctccctttttttctctctctcttcttatcacttcatcctctgatttcttggtttttttccttgggttgaagcttcgtaagagattataaagtggagggcaggtctttgttgatctttagaggctgcttaagttgacagtgacctagaatgaaacagccgggcctgactccgattccgggaattcttggtggactgctaagaactgctcccataactcacgtaaacatcccacatagccacttaatctgccctctcagcacatgcgtgcgcaggcacacacgtttgctgtgctctcgctgtccttcattcgtgtagctatgaaactgagccagtgaatgaaagaaagggaaaacacgtagctttggaaaggaggaagggacagttaaaacttttttaaaagagaaattaaattgtactcccacaacttcccctacaaaattaagagttttatttttttattccttgtgatttgttctgttgcctttacagataaacaagacgtatttttacagtttttgaaatactctttaattggcataatggacattaagttggtaagaaaaggaaaaaaaaattcttaaagacaaatattcacttcataatggacttttatacttccaacgtgaacagggaacctcttatctgtattattttatgttgctgggaatgcactgtggaatgtggtttcatctggcaccagttttaatcggctcttccaacatggtccaggcctcaccctcatggctcagaaatgcacagaatcaaagtcctgcggaatggcagctgatggctgaaacaggtgattctgctgctaccctgttcccctggaaccactttctgactgctgccttgttttcccagttgagaggggtgaagtgtgggtggctaggggcagggacccgctgtagacatggtattctaatggttatgtattgctttacccacagtggagctttaccttacaaagcaaaacagctgtagctgaatgatgaggtcaccgtcataaggccgcatctatgtgaaatggtataccctgtgccactctcaagcaccttcctgtgagccccttcccatgagattaggccttttataaaaatgcagacacctggcttcaggacttaggagagctggcccttaatgagagggaaccctattttcttgtcagttaactgcatgtgtaacaatgcgcatttgtctggtaggtgaaggaaaccaagattttgagcacagaagagatgcaggcacttaactgggtgtgaaacaaattcacataatctggattgtgcaggtacccaaactcctagtgtccgtgtccattcgtgtcatgtggtgcctgctcccctgcaccaccgtcttatagtcatgaaagtgggggttattggggtgtgtctgtggcagaagcattgatcttaaacattaaataagtggaattcacttgacggactgttattccaagaagttttgaatggctctctggctgatggaatcagtgcagttgtgagactctcattctaaacacacatgtcctacttctctgtgagatattttatcatggctgttctaagcacttatctaagttaatcactcctatagatagcagcatcccctcacaccaggtataagggacccaccaaccatgctcagtgctgcatagggcagagaagtcgcctgcagcccaagccttagctcaagatcgctagcagcggagagtgtggtgtactggatgcatacctttgccttggcagtgggtattctatggcaggacagcaaaggaatgtactcaactgcttcccaaagtggaagctccgttttatgaacattaatcagataactttaagatgtcagatctcttgagcccgccgtggcctggctagccactggttcccaatatttcagagcttactaaggatcgtgctggtgtctgctggttgtcttgcagagcacaaccacacacagtgagcgtctgctcctcaacttgggtgctggtgcctgagctgcagctgcagttgcagccttctctatagatacacaaagatttaacgttccttaaacaaaaataactgaaaggacttctagagaatatccacttgtcttataaaaggactctcagcccagagagcttctgtgccttgtcgatagtggcagagctgggatcccaatgcttctgccctgctggtttgagtcacattctccatagagcagtttgcccttcccagttctgtgttagtcagccccgttctcacttgcatcctgcctcgagtcacttgagcagcctctgggttcttccacagctccttgttctctgaaatgaggcccatcctatgcctgatgccgaggctgctcttcactctccacacctactcacctcctccgaacctcaggccagtgcaggcgctctgtcccgcatcccttactcacaactgtgctctccagcctctgccttgaaatgtttctcgaatgccttctcacatgctgacagaagccaaagaggcaaagagggtggcagcatctgaggactgggaccaggcgtggaggggagggcaccaggatggactcacaagcccatgcctcatcctgaggcagccactgtgggtgttgacctagtgctaccggggttgcaagtttctcaagataactagaaagttgaattttatgtaaagtcttccagttcttaattttagttactagtttctgaaaacttttaacactatataaacaaaagaaaacatactagccaatgagcactactttgcaccttcactccttcctctcaggcatttgtcattgattagggcagtggactcccactgggtctaaggagactgtctaaaagttctctcttcaagcaaactccccacaaaaccctttccctcaccagtgccattattcccttccttccaagagaaaataatttttatcaaatttttaatttttcataaatatgtttaattttaaattaagaataatgcaataaatagtctttcctcttatccctgctttctcctattgctatggtctgaatgtttgcatctcccccaaaattcatatgttgaaatctttacccgcaaggtattagggggtggggcctttgggattaacatccttataaaagaggcccaagagagtcattgacccttccgctataggaggttgctttgaaaagacagctgtctgtgaggcagcaggccctcaaccagatgccaaacctgctggtgccttgatctgggacttcccagcctccagaactgtgagcaatacatttctattgtttatgacccacccagtctgtggtatttttgttagagcagctcaaatggactaagacacctgtcttgtctttcttattatcttctagcctccttccagtttctcagccacggaaaacctctttcccgtcctagggtttcatacatgctatgctctctattttcagtgttctctcagcctttgcataactggttgcttctctctctttaggctcggcctaaaggtcaccttcctttaagaagccttccctgacaagcctgactagaccatcccaccaccccagtgctatctctcacagcactctttatttccttcctatcactcacacagtctgtagttgcacacttgtgtgtgattggtctctcttgccaagaaacacagagggcagggactgtttgcccactaccctgtacctagcacctcacagagggcctatccaggaggcagtcctgctgtatttagcacatgaatggatggatcattgatttactagaaaccctaagaaggccaaggcactattttggagcacaatgacaaacccccaagtgcttttgttattaaggatcttgtgacacttacttcatggctctgcagcccttcatgcctcactgcatgtgttgcacttccattatctggcttggcaattttgtacttggctcatttcttgtgttcaagcaaatcaagatgtctcaagaaataacagctcacacttgtgtacaaattcagaatggatagtttccaaatactctcaagacttataaataagggctaaagagccattttgttttctcacacgacacatgctaatcatctagagaatctttatttccaatggaaataaatcaaagaaacagaagaccagctttcagaatagcagaatgaggacacagtggattctctctccaacaaacatttagctggagaaaattatgaaagacaagcatttaaaatctctagaaattgtcctaagggcatacagcaaatggagaaacattctatgaatggaatcaaaaataactactaaatctaagtgagaacggcaagtgtgtggcctgtgagccacgacccactcctccaccatccaaactcactttctagagactaacctggggctctactctagggggtccagtcaagaagatggtcccctcttcccccagcccccagtgtagggtacatttcacccttcatggccagcctccagcatctctcatcacccagcaaatgagtcaggccaagaatacggacctgactgtcccactccagctcacccataggttggaggcttcatgctagagaggcaagcccggaagactagtgggggtaggtgggaagcaggcaatagaaactgcatttggagaggtccagatgtttgatttagccgacaaaagatttcaaaccagccattataactatattcaaagaactaaaggaaaccatgtctaaagaattaaaggaacatatgttaacaatgtctaaccaaacagagtgtcaataaaaagatacaaactatgaaaagaaccaaatagaaattctgttgttgaaaagaacaacaaccaaagtgaaaaattcaccagaagggctcaatagtaggtttgagacagcacaacaaagaattcgtggacttgaaattaagataatgaggctgcgcatggaagctcacacctgtaatccaagcattttgggaggccaaggctagtggatcacttcagctcaggagtttgagaccagcctgggcaacatggaaaaccccatctctacaaaaaaaaaaaaaaaaaaaaaaaaattagccaggtgtggtggacttgggaggccgcagtggaagcatcacttgagcctgggagatcgaggctgcagtgagccaagattgtgccactgcactccagcctgggtgcagagtgagaccctgtctcaaaaaaaaaaaaagaaattaagattatgcaatctgaaagggagaaaagaatggaggaaacgaaagagaacctcataaaaatgttggacatgattaagtgcaccaaaatatgtgtaatgagagtgcgagagagagaggatgatgccgaaaatatttgaagaaataatggctgagcacttatcaaatttgatgcaaaattttaataagttaaaatttgtaacatattacatacacccagacacctcaaagtcaaaatgtggaaaaccagagataaagagaaaatcttgaaaacaacaaaggaaacatgactcatcatatattaatacaagggagccccagtgacagtctagctgacttctcatcagaaacaatggaggccagaaggcactgggatatatcttcaaaatgctgaaagaaacaaattacttacaccatactttccttctggcctttaatccctgaggttaggtcagtaggattgaacactaattgttttatcttagctcaccttttcatttttatagaaaccaaagaccactgtcgttcatcttcattttgaagtattctagctttttacttgtttggactagacctaattattagctgcagaaccctaattcttacataaaatttccttcagtcacagaaccatgagaaattagtttgtactatataaatatcttatagccactacaaattaaataatgtcatacatatctgtggaaatgttaagactagttgtcttaaaataggcgatacattcttctgcatatcacctgctaaatactgctgatacacaaggtgaggacctaaaatcatgtctttctgcatcaggtgaccactcagggattccctggcattcttgggtgtaaaatatcatattatcaaggagattgaacacagtagtaattatgtatggttttgatatgttaaaatacatttcagagaaaatattgctaacattttgttgatagtgctaatttttgagaaacacctattaatactctgtgaatattagtgttggataaaacataaattttttgcatttttttatagaacataatttggaaaagctttaaattgaaggctatttgaaataacctcttatttatttatgccgtggtttccctagtcactttaaaaattcatcactttttaattactgtgtttgaaaggttgattaaccaatttttaagtattcatagtttttggttcttccagttctgtaggcctttaaactgtgctgtccaatagggtggctactagccacatgtgattatttatatttaaactaattaaaattaaataaaattaaaaatgtagttcctcagtcacatcagccacatctcaagtgctcagtagccacatatggctagtggctaccacattagacaacatagacatagaacatttattccatccttgcagagagttctcttagaacacagtgctttagactgatgatctattccttattgctgactacagtggtatataaatcaatttcacctgcacttgaattctgatggaggtttagctctggaaattaggctggtatttccccacttttataaatttaaagagatatttatatcaaatatgcttatatatcatttcattttattgttagtttgcttatttaatgttgtatggtttttgggcaagatagtaaacctttctgatctacagtcttctatgtgctaaatagggataataatagcctagctcctaagggccttttgaggagaagaatgcaaatagaacaggatctggcactaactgactgctgtcaagatgatgaacctctaacccacatacactatgaaaaaaattaatgtttgtattttaagcttcaaatttgtgggagtaatgtgtatagcaacatacaatgaatgcaataagagttaataacaaaaacatatatttaaaaatccctataaaatttgaaaaatacttcctgttggatcaaaaaagaaataatgacaattttaaaatatctacaactgataataaaaatactaaatattaaaatttatgtgatgtcattaacttgatatttagaataaattttagtcaaattagctcaactttaaaaagaagaaaggggccaggtgcagtggttcacgcctgtaatcccagcactttgggaggccaaggcaggcagatgacctgaggtcaggagttcaagaccagcatggccaacatggtgaaaccccgtctctattaaaactacaaaaattagccgggtgtggtggtgcacgcctgtagtcccagctacttgggaggctgaggcacaagaatcgcttgaacctgggaggcagaggttgcagtgacccgagatcatgccattgcactccagcctgggcaacagagggagactcggtctcaaataaataaataaaaataaacaaaaagaagaaaggactggacacagtggctcatgttgataatcccagcattttgagagtccaaggcagaaggatcgcaagaggccaaagtttgagaccagcccaggcagcatagcaagacctcgtctcttcaaaagggaaaaaaaaaaaaaaaaaaaaaaaaagccaggcacggtggcatgtgcctgtagtcctagctactcaggaggctgaagtaggatagcttgagagaaaggctgcaaactaatgatctaagcctccaacataagaaataggaaaggcataatagaataagtccaaagaaaatggaaaaaaagattataaatgtgagtagaaattaatgacataaacagtgactaaacaaaagcaagaaataataatcctgtggtaaaactgataaagagaagataaataatagtaaaaaggaaaattagggatatcagtcccatcaggaattggaaacatatatgtgctcactttggcagcacgtatactgtaattggaaagctacagagaagattagcgtggcccctgggcaaggatgacatgcaaattcatgaagcattacatattttttagtaatattaataaaacttgaaaaaaacaaatgtaagaatactgtagcatcttcatgctattaagtttgaaaatagacaagatggaaaaatccctagaaaaatatattaccaaaatatcttaagaaaaaaattaaaaagttcaaatagtccagttatcattagagatgttgagctggtagttcagaatcttctcaggaaagaaaacactaaagctaaatgattttattacctaattatttctaactgtcaaaacacagattatgtgagtcttatacttagaatttttatctaaaattttcaaaagaaaaggtaatcaacttgttctgtgaagctgatataaatgatcttgataccaaatgtagtatgaaaaataaaattaaagaccaatatcattaatagacctagagacaaaatttctaaataagacatagcaaataggatcttggctttacatcaaaagtgaaaaactactttaatactcagaaagaatttgaaattgtcatttgccacattaacgtgttaaagggggaagcaattatttaaattaatacagataaagcatttgataagctccaacatccattcatgatttaaaaaaaaaaaaaattccttgacaaactaggactccctaactgggtgaaggacatctacaaaaaaccaaaaatgaaaaactaccaacaataaaagcaaacattagtgactataaaacattcaagactttttctttaaagctggaacaaaataaggatgcccagtcactggcttctccagcattgccctgaaggtcctaaaaggcagccataaaagaaaataagaagcaaaattggaattatgaaatgattgcatgaaagtacactaaacggattacaaatagtaattgatggattacaaaagttcaatatacaaggccattgtatttctacacaccagcaacacacaacaacaaacaaaacaccatttaaaatagaacacaaaaccatagacagtctaggcgtagatctaacaaaacatgtacaagagctatatggagaaacttacaaaattttattataaaaattgacctaagtaccccaccaagaaaagatttatctaccagtcactctaccatgccctaaatcactatatcatgtgaatgacttcaatgctcacaacagccctctgaattagattctcttattttgtgttaaaaatgagtaagttcaagctcatacagataagcaacttttgcaagatccaaagttattaacataatgctgccccccgggaagccatttgtgttccattgaatatgataaaatttatggtaaatacctggcagttcaggaaaaacaagtaagtcatggggacacttttctgctcagacctgtcacactagcactgattttaggagatagcgtttcactgggcagaaagcattgacaagtgggtggaattcagcgcaggctgctgataagctgacgctggtctgggcagtctgtggaatgccacagttccaatccagtcgaaccaggggggtgatgactccacctcgggcctgagccagcctgcctctgagctgcagctgtgtgagcaaaacagagtgggagagcatgtgtggtgggtgtgaataccaggagaagaagagtgataactcgtctctagggcaaaagaatagacagaagcacccttccttgttatttgagacaaaggaaaacgtcagggcaaacttaaaggcaaaggtagtagccagttccatacctctcccttctcaacacaatcaaaaatatagaaactttgtatttggatctgtggggatttttgtgtttgtcttgacttttgcataggttaaaaaaataacacaggccgggcacagtgactcacgcctgtaatcccagcactttgggaggccaaggcgggtggatcacgaggtcaagagatggagaccatcttggccaacatggtgaaaccccgtctctactaaaaatacaaaaattagccgggcgtggtggcatacacctatagtcccagctactcgggaggctgaggcaggagaattgcttgaacccaggaggcggaggttgcagtgggtcgagattacgccactgcactccagcctggcaacagagtgagactctgtttcaaaagaattaatcaataaaaataaaataacatttaaagcaaagtcttgggggtatcagtaggagatgaccaggccttaatgtaatcacatgtggaggggtaggggccaccatgggttgttctctaacagaagagcctggagactcctcctaggaaatgcagcctggtcctacctccagttcccctacatgtcctggtccccaaggcttggcctggacttccctatttagttatggaatggagaagcaagtcacgtgaggagttaactaggaggtaaggaggcctttaaatggtgtatataccaaaaaaaagacattataaattcaacatcaaaacgtatacttttatacctgctctcaggtagcatactggaaactaaaaaagacctcagacttggagagaagagagggaaacaaaacaagattagactatgaatggaaaaattagttcccatctagaaatctatacccagccaaactgcccataaagtttgtggatcgattaccaacaactttattttcttggccatttaatgttttttctttgtgttttcctatatttctcattccattttttttcctctagtgattaggaggttatattccctgtttctgttctttggtgattatccttgaaattgtaccgcatacactatacttaagttaatatcttaactccaggcttagagtgatatgaggacttgggaacatttgagctccagtcactgcccgtttgatttcattgctatccattttcagtttttcagctctacacctttaatattattaattgtgttgttattctgtcctgtgtttattttgggttgtttgtatttttgctcattagtccttgtatctcaggcctttattccacaataatttccttattcctagagtacgtaatttagaaatcattttatttgtttttttgagacagggtctcactgtgccacccaggctggagtgcagtggcacagtcgtagctcattgcaaccctcaaactcttgggctcaagggatcctcccacctcagccttctgagtagctgagaccacaaccgtgcaccaccatacccagctaatttttttatttattgtagagacagggtctcactttgttgcccaggctaatctcgaactcctagactcaagtgatcctctcgcctcagcctcccaaagtgctgggattacaggtgtcaaccactgcacctggtctagaaatcattttagtaattagtaaatcagtaaatacgtcaggttctgtaggtagaaaatgctcctagtttttctttgtctaaaaatgtcccaggccaggcggggtggctcacgcctgtaatcccaacactttgggagaccgaggtaggcagatcacttgaggccaggaattcgagaccagcctgcccaacatggagaaaccccatctctactaaaaatacaaaaattagccaggtgtggcagtgggctcctgtaatcacagctactcaggaggctgaggcaagagaatcacttgaacacgggagatggaggttgcggtgagctgagattgctccactgcaccccagcctgggcagcagagcaagactccatctcaaaataaataaataaataaataaataaataaataaatacaaataaaaaaattaaaatgtccttattttaccatcattcttgaaaggagttttgctggtacagttctgagatggctttcagaattctgaaaatattccatgtcttctggcgtcattcattgctctttagaaggttgatttaagtcaaatttgtgttcctttgcagatgtactatcttctaaatcttctcattgtgtgtacttttaaaatcttatttgtgtgcttcttgcttttaacagctcatagtctttggtattctctagtttcattacagtgagtatattagttggatttccatttcgttgtcttgcttggtatttgtttggtctttttcccccctttgtttttgttttgagacagggtcttgctctgttgcccaggctggagtgcagtgacatgatgacagctcacttaagcctcaacctcctgggctgaagtgatcctcccacctcagcccctgaagtagttgggactatgggcgttcgccatcatacccagctaaattttttaaaatttttcctagagacaagatctcaatacattgtccaggctggtcttaaacccctcagttcaagtaatcctcccaccttggcctaccaaagtgctgggattacaggtgtgagccactatggccagccccacttggtatttgtttttcttcctgtatcttaaatcagttgggaaaaattctcaatcactgtaactacatattattgcttcccctcctctgtcttgttttactgaaattcctattagacgtgttagaccttctcactctcctctatttctgcaccttctctcatgtttttttcctctcacttctcaagctatattctgagtaatttattcagatttatacctcagatctcatatatacacttttcagatgcatatagccatttgttacacctactcagtgaatatttttatttcaataaatgtagctttcctttttgaaaatgtgatttcatccttcttcaaatctatcaagtcattttatgtagtttcttgtctcctattcatattttggggaccttttacctctttaaaacagttattctatattttctattcattaattctaatatctcaagtccccagcaggtctggtgttacttcttttgactattcccacatgatggtttgtttctttgtgtttgatttttatttgagcacatctttgtttggtcttattccatggtgaactagcaatccaagtaaaggtgctttttttcagacaggatatatttctgcttctcttgcaaaccagctggccctgtgggcctggaagacttcattaaggagtctacagttcttgacccttttgccaaggcagcacttaaggctcctggcttcatctgttctcctccaacatgtgcttttttcacattcttatctttagaacagtttttatgtccattttgtgatgttatttactgactataatttcttcaggctccgtgaaatgttttctgagaatatgtcattttgtgataaataagcttcatttacttcagttacaaaataagaggattggaaattcagtcataaataggctctcatgagtaacatcatctaaacttaaaagctggggggaatcccatcatgtcgctggctgtccatcatggctgtgttgctgcaagctgggacaccaggttttatcctgctgggatatgcgtgtctaaacgtgtactgtcgcagagaatgcctcttattgttgttcttatcgtaatgttatcctgcagcttttctcagtatcgagcatccacacaaagcaaatatttctttcatgggaaacggtaaaaatgggaaaaggacactctgtttctaggtaatgtatttggtttaagagaatggtcatcttgaggtacttttcagccatatttggcttaggttttagtttcatgcctgtggatggtggttcaaacacctgcatgaacacatacagaaaggatatcttgaattcaacgtttttttaatcctgactcacccatttaggaagatgactacagtggatttcttttttttttccccccttggtttttctttactttctttaaattatattgaccagtcacagcagtatatagtggctttataatgaagaagagggaaatcttgatctctgtattaatccaaactgcctcctcaaagacaaatgtgaatggttttttacagagcctgccttctggtacaagatgcctgtggaatgttcggtgaagtgcacttggagttcaccatgtcgaaggcaagacagttggaagggaagtcttgcagcctggtgggaatgaaggttctacagaaagtcaccagaggaaggtgagaacgtgcaggaatggcatccaatttgctacaattgttggttctttttcttagtcttttgtctctaattttatttttaaaattaaaaggcaataaaccaggatcctagagtttgcccataaaacaaggccaggagttgagtggaatctataaagtatctttaggggaagaatttcaattgacaacgaaaagaattaggcagatttcatgattcataattttattaaaagaagattaaaatgttatgtatgtcttttaattatgaaaatctgtcttttgtaagtgttttcttcactataacaataaagcatctttgggtggtaggttgtgtaaatgaaaatctaatttagtgaaaagacattttgtgagctttaagcaaaattcttaagttgtcatgtctttgcactttccaaagtaagcaagcattgttctctgccaggtttcatggcacctcgccctaaaatgttgtttttgataggcagaggtggagtgttacaaagatctggcctatctgtgcctgttacatctccagtaatcattctaatctatgaattagggggaaaaaaaaaagaaacatttttaatggaactatccagtcatacagtgaattgggggttttctcaatcttcttgttacatctctttctttaaatggtttgttattttagctctcttgttgatgtttatattaaattatagtaacatctgagctataacagtatcggaaggaggaaaagtccagttctgagtgtatgatattctgcttttggaacatttattgatagtatcctccagtagtttgcatcatgaccactctggctgtggccattctaaatggtgaatgtttagtgagcatttccttgactgagctcagtaggcatttagctctcccacaggccttgactttgagtcctgtctctctttcctgtggcaccgtactgctgagtgacagctctgcccaagagcttgttttcctgggagacatatcccctgtaagccctgagtagataagagcacattttcattgatctgtatagctgtgttttgttttggtttggtttggtttttggtttttttgttttttgttttgtcttgttttattttgtttttgagacagagtttcgctcttgttacccaggctggagtgcaatggcgccgtcttggctcactgcaacctctgcctcccagattcaagcgattctcctgcctcagcctcccaagtagctggaattacaggcatgcgccactacgcccagctaattttctgtatttagtagagacagggtttcaccatgttggtcaggctggtctcaaactcctgacctcaggtgatccacccacctcagcctcccaaagtgctgggattacaggcgtgagctaccacgcccggccagctatgttttataataaatacttcctcttgtttgtaaacaggcagctatattataatttaattgcattatgtatttggggaatgcagttcatccagatatttggaaagcatgtctagatacgagaaaagcttggttgggtcacatgagtcttacccttattaagactgaacctcattttagtcctcattagaatattcattgtaggccaggcacggtggctcctcacactttgggaagccaaggcaggctgatcacttgaggccaggagtttgagaccagcctagccaacatgtcaaaaccctatctctactaaaaataaaaaataaaaattagctgggcatggtggcacatgcctgtagtcccagctacttaggctgaggcatgagaattgcttgaaacctcgaggcagaggttgcagtgagctgagattgcaccactgcactccagcctgggtgacagagcgacactctatctcaaaaagaaaagaatattcattgtaaacatttcagactcacaagcatctgaagactaagtgtagttatggtaaccatcagggtcgtttagaggggagggctctttcactcggctgccacccacctgagcctggcaaggacacgagggggctcccgccacaggatgttccagctgtgctccaggccagaggcagctgttctggctggagactgcaggacgtagcatcttacagaaatactgctggggaaggacacagccagacaggacctgggaatctttgtctctctaaaggtcctgttctttcaccattcttctttatagccatacatgtacctaacatttaatctagtttttgtggttggcactagaagcctaaccgtctgtaacatttacatgggaaatgtttttgccatgggaaatgcattgagtattccaacaaattcatttactgataaacttttgaacctccttccttgttaaagttggtgactaatatttgatgcttttttaggttgagattattttatatatttaattatattttgccatgcaaaacatccaaataaatgtttagattgtgttcttgttcttttggaagctatatttcttcaaaacaaattattaaatagttttggaatgtgggatgttataattgcttattagtgacatcatccatccatggcccagtaaacacaacattctctctctttttttttttccaaattattgtgtttcatagcaattctcgtaaactttaacaaaatatgcttctcataaaccttaacaaaatatacttccccaaattcaagctaaaatgattaattttataatttcagtatctaataccgaaaataaccttttcccaattggaagatagttgtatgtttgggctaagtcacagagcctcttagatctggcctaccagatctaaatttcatctgatccacagttctggtgatgaaatatcactcagccctacccgctgttgaatggctgtgttgcagggaacttgtgatcacagagccaccaggcaggcacacatgctgccagatgcctatgcagggagcaccgctccagccacctgctttggtccagaggctcgcagaaaaacagcatcatagcttttgtttctctgacggactaattttttggatttgagtgtctatgtcgactggtcagaggaagaagagtcagaaaaacagcctgagcttcggtttaaaaactgtacagttttcacaacagtgccagtctgatgtatgctcaccgcagaacatgcagcatggcctgtgcttccttcctctccggggcacacctgctattcctcaatgactctctactaagggccaccccccaacctgcccccgaccaccgacctctgtcctcccaagtggcctgtgcggcactttagtaggccaaacaagctgagaagtcacgtggctttggtgtcataattctgtgtgtgaacttcattttttgttgctgtttattatatgcttttatttgtatttgccagggcaatactgagaaaaagaaaagaaattccctgaaatatgttaacctatcataggtatagaaactatagctaacaaattattttgtggggagtggggaaaggagacctctttcagttcaaaaatctggtatttatttcccaacttgttaaaacaaccacagagtccaaaatatattattaatttataggtactattttctgtaggcctcttgaagggccgttttacagtagtgtactggagaagctcttactgaagagcattttgtcaatactcagtgtctacagagggtgctgtctgagtgttgagaatgacaaaggaagcaactgacatggtctttgaccttgaattgtgtccctttcaacccaaaacaggacaggcagaagtattagagtagttgatgattcaattaactagatcttagctgactgatctcagaaggtttcatgaaagaagtgagaacaaatgctttaaacatcttgatctagcagaaagaaaagtgtctctaaattggtgagatgttatctgtggagacaaatgtaggatttagagagagagatgcaaaaggggaagtaagagggtttattcaagagagattatgactgggtgcagtggctcttgcctgtaacctagcactttgggatgccaagacgggcagatcgcttgagctcaggagttcgagaccagccagggcaacatagtgagacctccacctcaaaaaaaaaaaaaaagaaaaagttaattctctcacttattcagtaaatattatttagtccctgtttgtactatgctcccagctagttgccatggcattgagctgtgtgccagatttgggggatttatcacaaaccagaatatactgaggtataaagtctgctagataaagcctaaatcctattattagggattttgcattggttccagagaaatgagggtcgatatgagtttttgagtgaagaagagaagaggtcataaacacaaaaatggagtaagactgtctactcctgtacctgcaatagatgggaaattgagggagagattgggatagggccacaaggctggaaacttttcccacagctgaaggaaggggaacagagaagtggtacatagggagctctcaggagctgtggcacatgccaggagcacaaaacagctcacttcctccacactcagagcagcatggaagccaaggggagactcagaaggatagctggtgatgcagcaccacctagcaagcacccacacagagagcggaggctcagagcacccactttggagggggtgcagagggtggggtaagatgtaggagctctggagagaacaggaaaggcatgggctaagggctaaaatggaagggagaacaagctcccaggcccacacagccatttcatcccctggggagtgaggcaaggcgaggaccactgccctggtcagtttccatgaaaaggtgaggggaggaagtgcatttcagagaatgagccaattgagaagctattgtctaaacaccaaatttgatttttacggcagcagattaagtggtgataagctttatatcagaagccaagctcagtcaacatgctcagaaaaataaccatctgagtcaggatagaaagttcctttgtagcccccagtgggattcccagcccactgccctgctagcctctgcactagtttcccaggctttatttaacccccttttccctcacaggccagtctcatgctgcaccctcattaagggcccagcactgcctcccttgcctcctgctgcaaccaccaccagggtgccctctggcaccatggaggtaaccttgcagctcactctggtgcctgtgcctagggctgtgtgggatgtctgctagcctgtggcccaacacagacgcatgttttaatgtcagtgagcagtgtcactggtataggtttgagtgtgccccttttttgatgaataatatgagaacatcatgccattcatatgaggagccctccagtgcatcatagatgcatcatacaagggctgctctccagtgctggcccatggcacgtgcctgccttccccatcccctccagtgctggcctgtgccaggtccccaccttcccccgccccctccagtgctggcctgtgccaggtgcccacctgcccccatccgctcctgtgctggcctgtgtcaggtgcctacctccccccaccccttccagtgctggcctgtgccaggtgcccacttcccccatcccctccagtgctggcctgtgccatgtgcccgcctgcctccatcccctccagtgctggcctgtgccatgtgcccgcctgcctccatcccctccagtgctggcctgtgccatgtgctgcgccactgggctccaagtctaatggacctatgatggcttcatcatcattacaactgttccttgtagggtgtctgcacatagacagtcagtgaaggtgtgtcaattgcatgcccagccgccatatttcacagttgcctgctggttggtaggctccctcagggcaggtgctgtttctcatttaccgttatattttctgtagatagcagaatttctgacacatgataagcaaataatttgtatttgtgggatgcacattaggtgttttcttgggttaatcttagaacttttgtcagcaagatttaaatgtgtgtttatacttcataattattggagctcaattttagcagtaagggtggcgacccattactgtatgcggtgcaggtgacagagtctgtgtgcggtgcaggtgacaaccacgctagccatgtgcctctggacacagaccctcggtgtcctcactaatttaagggaaagtgaacatgggcatgtggtgaaagcactttatcacggatggcaagagtgtgagtgttcattatgaatttttcacaggaaaaaaagttgtatgcattgcactttcccttttccttttagtcttcacaaaagtcaattacagaggaggaagctcaatgtccacccagtcttacagaagagggcctgagatagaggtggggtgactggcccagggtccaccagccagcccagctgtgactgggcaggatgctggggccttcagtctcccgcagagcccatcacgttccatccagctgagtgagactggggtacaccaaagtgctggagagggaacccttaggaatcattccacacaagtttactgggccgggttatgtattggagaatcatttcagaggctcctttaacaggaaatatgtagtggtaagagctctccgtgggtaagaaacttcaatagtaatttacttcctttgattttccttcttcaaaaaggccacccttttaaaaagccacacacttcccttggggtttgaggtccagaatctctttcttaattgctatgcttagaaaccctgcttcaaaggacatttctaagaattctttcatgattttgaaaaataaaattgttcctggtgacttcaccgaagtttctgaaaggagaataaagtaccacttaagatagagtgctgggctgggctcaatggctcacacctgtaatcccagcactttgggaggccgagaggcagatcacctgaggtcaggagtttctagccaggcaggcgtgccacatagtggcatgcacctctaatcccagctactcaggaggcagaggtaggcgaatcacttgaaccgggaggcggaggttgcagtgagccgagatcacgccattgcgctccagcctggacgaaagagcaagactccatctcaaaaaacaaaaagagagagagagagaatgcgaatcttgagaccaggactgctcagagcagcaacagtagacaccttctacctgagcagcatgctgttacttcaagcccttcatcagtttaggagtatgttttgtgttttccctatagtttttttctttctgccaaatgttacctcccactagtattttaagtcaaaatttaattttattgtcctttaagactggggttttttgggccaatatttaactattgtaaagtatctctttgtaagatcttctgctaaaataatgcattctaagcatccggattgcgattttttttttaacatagagcattttagaaggtacagtaagctctacaaaacattttctttggattggttacattttaggaagatgaagtctgttttcctgatttttgtttaatcgctttatttctgagtgtctttattgttactgtaaactgacaattatttttactagtgagtctaatccaagattaatagagatcgtgacttattttaaaggaaacatattttttaaatctaaggtcttagtcccaagtcacacaaatcattattagaatttataactctctaaggcttcaactgtttcttcacttccttatatatttggttgctttactatgaacacattaattgattcttatacaaggagtctttatcttaataatctgcttaaaataattttgataatgtgtattttgcataagaacaatgaagaaaatcagaagttgaaaagttgaatctttaatttacaaagacttattttctcattagaataataaaggagtgtgtagaaatacagcaacctgagcaatattatacttccaagttttagtttcttcattttaattagcagctaaacagtcatgaatcttcagtgatttaattaaggagggaaaaaaggaggaatttatgtgcttagaccagaagaatatgggatatagcaccaataataaaattcaaaagtgatacaattaaaccaaggtggtcgttgtcctaaaacatcaccccaatgcaaacagagagaactggaagtaaaggaaggaaacatctttaagagaagacatgaaatgggccataaaagaggtttttattacgtccaaagtgaactaactaaaaggagcatgctacaacatggaaggacctcaaaaacatgatgctaagtccaaaaaaaaaaaaaaaaaaaaaaccagacacaaaaggtctcatgccttgtgactcccgtattgtgaaatgtccagaccaggcaaatctatggagacagcagatgggctgccagggcctgagaggagaggaagtgggagtgactgctaatggggttggggtctactttgggatatggaaatattctgcaatttaatagaggtagtgtgtgcacaacattctgaatgtactaaataccactgaattgcatactttaacatgactaatttcatgaggttttaatttcctttagttattttcttagtataattttatgttatattaattttacctcaagtttaaaaaagaaaactgaatgtctagaaagtgcttatgctgttatgaaaataactacaactatttcataagttcagttggaaaataatagtttctcaatggaacttctgggcataattccacatttatcaaaaaggtataacataaggaataggggctcaaaaaggaggaaatgccagttattaaccttggccagtaagggtattttggggaaataagaacacggatttgtttattaaaatgggcacccctctaaaccagccatcacttttgtctttcagtggaagatctcttatccttaagataagaaacctgattttatatctactgtatgtaatctactttcactatcaatgagagtgaaaatcaagagtgattaaagcatgcaaagggaagacaagggactgtgatcaggcttggaacacccatctgtttgatcacaggaaggaggatgaatgagaaccacaaaccgtctgagagattctgtttgaactgtgtaggctaagcattaacaattcccagcattcctgccctgagtacctacccttctactactgaagctaaaactatttaaaacttttagactatatttaccactactcaacaaaaataagctcacattattgtcaattagataaaagttctgctttgactacagtcttctgtatgttgctatggcttcacttattctttcagcaaacagcaccttagcatgggcttgtgaagtcatagctcctgccctcaaggcatttacactccagagagcagcaggttaataacacttttgctgtagtgggtgaacatccccctcatcttctttgttcagcaggggaggagccctttggctgggactcataggttctagtttctaggcagaggcccgtgggaaagcgctcagagtaaaatgaccttaccctctacccataaacttattttcccagtacaagttgagcatcccttttctgaaatgcttaggactaggagtgtttcaaatttctgatttttatgaattttgaaatatgtgcattatacttactggttgagcatccctaatgggaaaatatgaaatccaaaatactccaaagagcatttcctttgagtgtcacatcagtgcacaaaaggttttgaatttcagattagggatactcaactttggtcagaccatcttttgaccaaaaataggctgttgttcagggccaagtgttatttttgtatcttctgtagcagttagcacagtgttcaataaaaacccaatttggccgggcatggtggctcacacctgtaattccagcactttgggtggctgaggcgggtggatcacgaggtcaggagatcgagaccatcctgggtaacatgatgaaaccccgtctatactaaaaatgcaaaaaattagcttggcatagaggcacgtgcctgtactcccagctactcagtaggctgaggcagggagaattacttgaacccaggaagcagaggttgcagtgagccaagatcacaccactgcactccagcctgggtgacagaacaagactctgtctcaaaaaaaaaaaaaaaaaaaaaaaaacctgattaataaatgatgaaatctgaacctaacaaactgttaaaattttttcttggctataaaaacaaattttttagaagtgttctcaaaagtgactttattcttcctccctcactccactacctactcccacataaccaaggaacacagtataaccgagttagctctgaattatttgactgtgagggccaagcttactcaaggggacttgctggttaaaacaacaacaacaaaaacttctaggagcatcctgatcactgaggggagaagctgtgattcagcactgattcacagctctggctttagaatccatatgtcttggttaatacattggtttttaaatttgctggttgattggtactaatcccatccttagttatcaacaaggataaatctacttccaaaagttgttaggaggatttaatgagatcacattcatagaagtaccttgtgcaatgtaaaccaccatgtaagaagttgcttttcccttcttcctcagactttctctttctacttaattgaaaaagtagaaatccagccagcactgacccaagactttgttgtcttgtttttacaaacaaaatgggtagaggaaagaaatcagaagtaatttagaaaaatgatacagtttgaaagtgttccatgtttttcccaaggaagaatataaatcatccagttggacattgctaggcattgtcaattacccaataatgggaaggaatggaaattaagccagtgggatttgtacagagagatctagttaaaacagggataaaagaaaccaaatgggccgggcgcccattacacctgtaatcccagcactttgagaggctgaggcaggtggatcacctgaggtcagaggttcgagaccagcctggccaacatggtgaaaccctgtctctactgaaaatatagccgggcgtggtggcagatgcctgtaatcccagctatttgggaggctgaggccggagaatcgcttgaaccctggaggcagaggttgcagtgagccaatcatgccattgcactccagcctgggcaacaagagcaaaactccgtctcaaaaaacaaacaaacaaacaaaaaacaaatggaagatcagctgatatgacagcataaaaacaaataccacttatccctccaggttagtaatttaactagttaatttaccttgcagcacagtaagtctagaattcagtaaatgggcagggttttgttttattctttttttaaatcatttcttctcttaaaaatatttcccccaccctacccttcactgtccttcttaccacagaaattataattatctaccagtaggaggtcagtggttttatttatttatttatttatttatttatttatttatttatttttttgagacagtctctctctgtcgcccaggctggagtgcattggcagagatcagtggttttaagactttcagtttttgtttttctttctttttttttaatctctgctcactgcaacctccacctcccaggttcaagcgattctcctgtctcaacctcccgaatagctgggactacaggtgcacaccaccatgcccagctaatttttgtatttttagtagagacggggtttcaccatgttgccagtatggtctcaatctcttgacctcatgatttgcccacctcggcctcccaaagtgctgggattacaggtgtgagccaccgtacctggccctgtttttctttaatagaaatctgttcaggcacgatggctcatacctgtaatcccagcactttgggaggccaaggcaagaggatcacttgggtgcaggagttcaagaccagcctcggcaacatctcgagacctgtctatacacaaggaaagggagggagggaaggaaggaagcaaggaggagagagaagggaaggggaaggggaagcttataaaacaaattatgtgaagttgtttgttctggaaggtggatgagttgggccaccatggctccccacccagctccttaggagtccagcagcatagtctgaaagcatctgttgtggattaattgcccatataaacatttcacatgttccatagttcttctttcttcctctcgggttaatagcttgcggcagtagttgctaccatggggacactgggtagcagtatgattcagaagcagaatagaaatgttcctgtattaatctcaaataaaaaatccaaatatttactttaaatatgctattattagctgaattctcaaaattggaaaatcttacagatttgaattttggaaaaaatacttaaatctttataatttgccaagaaaatctctgttaatacgggatgctgaaagtggaaagaaaagaaagcttgagtgtcactagagtcactctattttttcattttaccttcaaactagctaataaattagatcatggtatttattttttagataagaccctgaagttcactgacattaagtaatttggatccctgtatgtgagctgggtcttaagacaggtgcaccaaattccaaagtctgattttcagtactacagctgacatttaattacttccagttttaggggaattcatttctataaatttctcatttgttttatatttataacccctggccctcaaaataaaaatctgattatttcttgtcagtgatgttgatattaatttagattcttggtattttccactgtttttgttaaacaacagcaataaactatctatagtaggattgtcttgagtaactaggagtattaaatccatagtaaataattacactgcctgcttttggtttagttagggttctttttttttttcaaagtttacttagatacttattaacaaaaataattagcttttaaaaaaggttagtgcaaaagtaattgcagtttttaccattacttttaatatcattacttttagtagttttcattactgttaaataaaagcaagataatttacttctctttctcaagccaccaacaacggagtgggttgtgatgaagccattgaacctggaccatacatttgtaaaaggcctcagattaggactttcagtatgatccataaatgtgataataatatagccactgttttgttggttgttgctgttaacagaattaacataaattataacaacaatttaataatctctcttttaccttttacccactggatatttaccccggtaagtaatctttcacatctttctccacgaatgtagacatatctataaacaaaaagatatggtttgcgtttttcacttaatttcaccaggatgtccctctcctgatagacattcaggttgtttctggtgtttaccacttcaaagcagtgctgcaacacacttccttgtatatctctgtctgtatctcctgtatgtattgagcttatattttaaccttctttactgtgaaatataacaagcatatgaaagagggcataattgtagattgtaacaaataataagtgaataaataaagctcactcattaagccaccactgtaattcaataaacatggtgggtatccagaagccacctgctgcccctaccctgatcctaaagatcttcacacttctgagagtgtttccatgtttttctttacagttatactactttttgtacatctttagaaatatatttaggctgggcacagtggctcacgcctgtaattccagcacttcgggaggccaagacagaaggatcacttgaggccaggagtttgagaccagcctgggcaacatagtgaggccttatctctacaaaaagtaaaaaattagccgagtgtggtggtgcacacttgtagtcctagctacttgggaggctgagatgggagaatcactgggtgacagattgagacctggctgtcaaaaaaaaaaagtgtgtgtgtgtgtgtgtgtgtgtgtgtgcatgcgtataggtttacctgtttttgaactttatggaaacagcatcatgcttgtgcattctttgtgttttgctttttattttattttatttatttattttttgagacggagtctctctctgttgcccaggctggagtgcagtggtgcaatcttggctcactgcaagccccgcctcctggattcacaccattcttagtctccctagtagctgggactacaggcgcccgccaccatgcccggctaagtttttgtatgttcagtagagacgggcttttactgtgttagtcaggatggtctcgatctcctgacctcgagatccgcccgcctcggcctcccaaagtgctgggattacaggcgtgagccaccacgcccggccgtgttttgctttttttgctcactagagatgccgcggccccagctgcacacaaaaggaccctggtgtgggggacccttacaaaagaggacggaaacaacatagttttaaaccaataaaccttgtaagtttcttctgtctattgcaggtagctccggtttattcgttttcattccattttatgcatttaccatagtctctttgttcatgcagttgttctaggcatttccgaccactgctggcagcggcaggagcccttgctgtgtatcccctagggcacaggtgtgcacatcgtgggggtggggtgttcctcaccttcaatggatagtgctaaactgtcttccaggagcggagttcagcctccatttctgttagcatagtagagttcctgctgctctgctgtctttccattatttggtacacttaggtgtctttttcattatcttttttctggcctgcatttttttcaaactggtagatctgtagtggaattcactgtggtttaaattccagttcctgattaccgctgaggctgagagccttttgctgtgtatttccatttgtgtttccactttgatgaagtgctgttcaagtcttttgtttatttttcttttggggtgttgagctttatatattctgagtagtagtccttcattggttgtgtataatttatgtgttgtaggtggcttgtctttttatcggcagaagtaccaatttttggagggggagcggatagcattcccaaagtgggactgcctggccagagtatgtaactggacttgttttcatgacccccaggcagggccgcaggaagcatcaagtgtttttgaaatggcttctggacccatagctctcccgggttggttggcttacctttaaccagaacactcccagcagaggctatgggtctgtgtctccttcaggtaaaatgagattaacttgagtaccaagggaaacagtgaagtgtaaaagtcaagagctaccgtttatcgcaggccaattaggtccgttttgtgtgatcttcaaaataagtctcagaagcagatattattttacccacttcacagatgaggagcttgaagctcatcaggaataaagattttactctatgccatacaactggaaagtaggaaagtggggttaaagctcactttcacatggctcccaagcaaattctgcatccattctggcagcttgaagcatagcctagcttcatggtactgggtaccttgcagaggaggcatgggtagaacagagtccacaccagatgtctgactgtgacataagccacagccccttctcgtctgcaactctccgtgactgggggtggcatgggagctctgatgaggcacactccaatgccggtgtcccacccctccccaaggccagccgtggcacactgcaggctgcttactgatcaggttgaagcctggtcgcttgataaagggtattttgttgttttcttcttcattatttggcacgtcaatgtaaattattttaataggactcaacagtttcagtctttgaaacattatatgaggggaggctacttgatgtgtgaattcaagataataagatgaattgtaaggagacaagcatttttgttaagtatcagagcacacttataatatttggttaaaaaaaaaaacttacacgtgtctataagagatatgggctgacagattttgtgtggtagtgtgggtttttccacctccacgctggtgagcgagtggatcatgtgaggcttttggaataataagtaccaccaggacagaagagagaactgtttgcagagttacagatagcaacatgtttcaggagctcttcatttcctgtgaagttgagagagtgtgtggggggggtgaggggtgcgcgtgcacgtgcgcctgtgtgtgtaatttcccaatgaagtagaacagaagtgtgtaaagaacatttttttttacaaagttactaaattatactacttgataattttatgtccccaatcttgagtcaagagttgattaggaggattttttctttatatattattatattatttttatataatttatatacatatattatttttaatgccctgtctttaacaaaagacatttttaaataaaactagcaggctgggcacggtggctcacgcctggaatcccagcacttgcggaggctgaggtgggcacatcacttgaggccaaaagttcaagaccagccttgccaacatggagaaactccatctctactaaaaatacaaaaattaaccaggcatggtggcatgcgcctgtagttgcagctgctttggacgctgaggcaggacaatcacttgaacccaggaggcggaggttgcagtgagccaagatcgcaccattgcactccagcctgggtgacaaggcgagattccatctcaaaaaataaataaaactagcagatgtcctgtaaaatgtgagacattccagagttacaaatttatcttatataattatataaatttaagcagagattcaaaggaatagtgcaaagggcttaatttcagatgtgtgttttaatttccttctttcagtttctccaactagctacaatctgaaaaatatcttgctggctgggtgcagtggctcatgcctgtaatcccagcacttttggaggccgaggagagcagattgcttgaggtcaggagtttgagtccatcctgagcaacatggcaaaaccccatctctactaaaaatacaaaaattagccctgcatggtggtgcacgcctgtaatcccagctactgggagcccgaaacacgagaatcacttaaacctaggaggcggaggttgtggtgagccaagattgcaccagtgcacttcagcttggacaacagagcaagactccgtctcaaaaaaaaaaaaaaaaaaaagagagaaaagaaaaagaaaaatatcttcctgaaattcagtgaacttgctttggaaatgtttcgtaagttcccacatctatacggtattcataggctattcttagcggagatcaatctctggagtcagaatgcctgatcagtttcccttcctggctgtcccaccacggtggttgaagggctgctccaggacacaccagaagtattactgaaatactgctttatggtgtgcattttactgttctgcaatatcttatgtcatagaagagggtttaagtatgaaattcacatggccacagttttatatagttgtggaaacccaaggaagtatttttctttgtattctaagccatgttctcttgtgctgccacaaacccttggcccagcacaggtgctgtctctgtcctctgaagagccacagtgcagggctgtcctgtctggtgctcaagacccgctcctgtggcttagcaggaccgatgggcacaccgggggttacatggaattagtattccgctagcttgacttaggaaaaggaagcgcaaccactccaaaagtagagtgctgaagccactgggctcgctcccaaccctgtgctgctcctgggctctgtgtcagctttccagtgaagatagcagcactactcttttattgcagaagtccccagtttttcatttcctggaagctttgagattagttttgaatgggggctttgaggacagaagaaagataatgttcgtaggaaaatcattaagcagagttcaagaaagtatagcaatggatgtatttcaggtcaggtttagtggtctcctgattagtggcccctgtcttaagttaatgacactttttaagtaatagcttgactgagatgtaatttacatactaaaaatttaccctttttaaagtgtacgaatcattggtttttattttactcacaaagttgtgcaaccagcaccctaattctggcacattttcatcacctcagaaagaaaccttgtaccttcagcaggagctccgcactttctctcccccagcagccactcctctgctttccgtctctgtggatttgcccgttctggacgtttcctgtcagtggaaccatacagatgtgacctttggtgtctttcactttagcagaatgtttttaaggtccatccatgatgtaacatgtatcagaatttcctttttttttttttttttttttttctttgagactgagtttcttgcttgttgcccaggctggagtgcaatggtgcgatcttggctcactgcaacctctgcctcctgggttcaagcgattctcctgcctcagcctccagagtagctgggattacaggtgcatgccaccacacccagctaattcgaactcctgacctccggtgaccgacctgcctcatcctcccaaagtgctgggattacaggtgtgagccaccacacccggccagaatttcattctttttatggctgaataatatttcatgacatagatacatcaaatttatttatccattcaacagttgatggacatttgggttgtttctactttctgggtaccttgaataatcctgctgcaaacattcatatgcaagtttctgtgtggatgtcagttctcagttctcttggatagacagcaaggagatgaatggctggattgctgccacgcagctttccagagcgatggcctcattttaccatcccaccagcctaatggtacattttaatcactgctattctaatcttgttagagtcttaaggtttccatggctcctaccagtttgttcatgatctcttgggctatttgttgctgtctgcctagcagaacaaatcttgttggaggaaatccatttcagtatgaaggcaaaagtttaattcactcaagtattgtttttttgtgtgtataagggtgacataaaagtagataagctatcttctggaaggcattatttttactccttaattatatacctaaactgtgtcaccaactagcctagagtttaatattaaatgaatgaaatgaacaagtgaatttaggttaaagaaatgtatcagaagccatgggtttcttacagaagaaatcagggctcatgaaaaattctcatactgaagcgttgagggacacttgtgatatgtgacaggtgccggcattgctgaaatgccatgtgtccttactgtgcagtactggccggtgggattgaagagtcctgccggccctgctagctagtatgccagatccatggcctcgtgccatgccagcgttatgcgcctcccaggcaccagtctgtcatctaggcactgggattccacagagaacagacacatagagcctgccctcaggaggttcacattctcgtgaggacacaaaacaggcagcactaactaagccagaggatctcggtggtgaccagccccggaacacagggtgaggtggggcagaggcgcctcagagtggcatcaggggtgacctctgtgcctcttctcacctatgtccttgtacagaacccaacagtgattcttacaggaattgcctcttcaagactgctcggcctttgctgttctctttggcactgatgtgacattcatgcagtgggagccacagcagcgctaagagcccttctcagaggtggtcctccagggtgggagtgtgggagcatggccctagccccaggagccacatgaagagctcctttccggtccagagagacttcctcagtctccacaggtctttctcaacactgcaggttggcctgctcctaaaactactatttttatgtcgagtgtggagccacaggaaagaatggagttataggaagtgttacattatttataaataacccacatgcattgacctaattttacaatgaatgggaatttacctttgtaactcaaaataggattcctatctaagtttattggacactattaataatgattcagcaacaaataggaaattgtttcttagactgcactgaaattatatcttaaaatacagcctaccagatatgtctgaaaagtctgttgtctctggcacgtagagaccctgctgtgtgggggaagatgtgtagtgtgtggccagcagtgggcaggaaagggagacagactgagagaggggagacaatctaaagaacatgaccatgtaaaagataagcggggaggaaagaaaaaaataaaaatgaatgaggactggccaggcatgatggctcacacctgtaatcctagcactttgggaggccaaggcaggaggatcacttgaggccaaacattggagaccagtctgggaaacatagtgaaaccccatcctgtacgaaaaattttaaaaattagccaggaatggtggtgcacacctgtagtcccagctacttgggaggctaaggccagaggattgcttgagcctaggaggtcacaccactgcactccagcctgggtgacagagcaagactctatctccaaaaaatatatatatttggggtgtgtgtatgtgtgtaatataaaaaatgagggcccaaagaggtttttttaaaaaaaaatatgagttaatcagtattcaccttattagaaattaaaactgaaaaagatttaacacattaatttacctaaaagcatctataatcaacctattagatgacaacctaaataacattttttatgaaaaatatttcctaaaacacaaaaacatatttagcaatgagagtcacattgccctgtgttttgcaggtctcttcactggttgaacaggagatgatggattatcatctgtgctctgccttcagtctgttgtaatatcacacatcatgggcctctagaaaacaccactgtacactcatgagagaatggaagtgagaaagaaaaataaagacttggcagaaaacagttttggccttgtaggctgcctgaaaggctctcggaacctccagcgacccccagaccccactttaagaatgactagtctaaagtattccactatccaaatgaactctcttggagaggtatgagtcctacagcagtaacaggtacagagaaattagcagcaacatgacaaattttaagaacattttatacccagaatacatgcttggttaaaaaaaaaatgattccaagctctctgagggtgagtccatcatgggccaggtgcttccttgttatcttcccgttttctgttgtccacagcaccattgtggcttaaatctcctagagcaaattccactctatccacacccaaaagaaagtggttcaggcagttttaaattgtcctgtgaagatttgagagttagttggatgagacagtatcagatggaaaaaataagccctgaaataactaagagaataggcaagcaagctggtaatatcagctaatgttccggtgtgcaaagaagactttccatgtttactttcttccagtggactggagagtggaaatcttggttgcccttactttgaatggttggttttccaaatgacatttgtcatctaccaatcaagataaataacaccagctataatgaggccagaggaggtagatcatttgctacaccaaaatatccataaaatgtgtgtaaaaatatgtaaatttagcattgtttcaatggcagtgaggtgggaaccctgcttccttcatctattgtatatttctgagactcctcttgggcgtggtgccactcccactctcttcttggtccgcagctgatttctattgccccaggacttgccccatcctcacttctgagctcatgagtgatgctggggctgcctttttaggaattcaggaaatggaggcacccagttaaagttatctgcaccttactcatttccatgcacctttcttgtcgcacgatgggaaacctcagctctagtttgtttactaaggagaaacatctgtcctttgacatcacttccgactcttgaactgaatttgtaatttttttctgaagatggtctcaagttggttctcttcctttgtgatttgttttctacttagattttgacagcttccaaaatatgttaccaacaacaaaattcagacaagaaaattggttttttttcattctaagaagttaactttgctccgtataaatatctccatttgtttattcctaaccctttataatgtttagagtatttttttctctctcaaggatctggtaattactaaaacagcaaatttggaaatgtttttaaaattaaagttaatggctctgtctttgtaaatttttctttacaaatagattggaaatgttcaggtgcaattctgctttgcaccagagagcactttgtaacacaaaaagtcttcagtcagccaagctcacctgtcagcctgcagaaggcacttatcacagatggctggttgtttctagcgccccatgctgccacactctcatagaaaggtgtctgcttcagcacccacacctagcactggagactttggaactgtctttcctcctcaaacagaggcacatgtcagcgagggatagcagcagcactaggaattagagaatcacagaatcctacaagggaggaagatgaagctgagagagattcagaatttctgccgtggaaggtggacagtgtcctttctatccccaagtctgcagccagctttcctctgagcaaatgcacatcacctgcagcatcatggggttggagtgtgcaggctcagccctggaggacgtgagttggcaggactccttccgcgtggccctcatctccagtacagcccagtctcagtctctccatggggccctcatgagatgtaagtgatgtggtgcccccatccttactctatctctcttgaggggtgtctccaagggcttttttataagtgagaacatgttctcagaaagtgcctcttacatttcattgactcgtgacatgtcggggtggccttcctttaaagagtgtggaagacttgaaaacagccgtagggttggcctcagtgagccatgattgctccactccagcctggatgacagagcgagagaccctgttaaaaaaaaaaaagaaagaaaaaagataaaaacaacacttatatttatttttatggtaaatataattttcattgtggtaaaataacatactataaaatttacaattttaaccattttaagtataacttggtagatacaattttaacatgtgtatagatcttgatatctttccacttaaaaaatacactggttactataataaaaacatagcactgaaagtctttcagcttcctgagcgtgactttaggaaagcacgtgtgggctcctgccaggcctcctgcctccctcctcccgcctccaggagcagctgcgtgttctgcagcctgtgctgcaggtgggtctgccacagcccccaagtgagtgcgcagaggaggctcccaggctgtccctgttccctgcctatgccatgtaccatgctgtctcctttcttctccgcgtgtcctgcaccaccccccagccttcttcttgccgctcttcaaatacagctgatttttagaggtcagatgaactgtgactgagtgtgatgggaaacgtggctctcccttcactgatgggtagctgacttgacctccccccatgctctctggcagtcttgtgggagctgctgggtgagctgctgactgctgcagagcctgccagactagggacctggtgagtaggacagctggccctgcttctctccttgtctgctccacaaacttgttgtcacagattaatgacctgaatttgtctgcaggctcattttatgcaatctataaattaaggtataccccatgaaatttattccaacataattaagttatcaaatcataagcataatgaattaatctgtatgtcccttttttctctaattaaactttatattttaaactttttaaataaaaatgtttattaatctttgaaaagacagactaatggtggccactcccctgtcagactgtttgttgcttaaacatatttttaaaggatcacttttttaaaagaatgtttcctgtgtaacaaaatgaatagtaaagaatgaattgcagtgagaggaacaatacactttttaactgtgccaaaagtgagcttctacaccaagtctatgcccagcagaggcgggagtcatttaaatgaatgtgtcagctgcccccagacaactctgcttcacaaggcaacagtggccatccaaaccattatctatttttaaaaatagtttttaaaaacagtggagaagctgattttttatgagactaagcattttatttaactcatagccattcttcagctaagcattgtgcattaaataaatgtataatatgtctaaacttttttaattagctggtagcatcctctaaataaaagtcattaaattcaaatagaactttcctatggctgtgtgcttctagaacagcatttgtcagaattccaagggaacgctagtttctcaggacattattagtaatgacaccaaaaagggtttcatggttataaatgggagaagctttagtttaaaataaaacaatatgtcacaggtgccttttacacggggctctctaggccctctgccatgtccagtcccactgtagcatgtgagggtcctgccagccgcagatgtgccacacagcaacaatggccgaacagggagttctgttctcatgggttacacttcgcagaacactttttgggaaactccaaatttttagggaaattgataagcactctgtcactgtctggaaagggttgtttatttttctatactgtataaagaaattttttttacactcatcttttatcatgctcttaattttactctgtttcttcacaaagtaacactaggattaaaatcctgtcttcaactgggcagattttttagcaaaaaacagcataaaagtttatggctttagcaatgacaatactgataactatagtaacatcaagtggctaatgtgttggacactcactctgagcgtagaaaccttagtaggtgctgcacatacgttctttacttcctttactccttgcaataatgccagcagcatcccccagtttcccagaagggctgacacaaggtccaagcattttctcaaggtctcacagtgtataaaaggcagagcttaagcaagatgagtttcttgactccaggggccctgctgttccccatctctgttaacaaggggctcaggtaaaggttagagccaggtctcggaagtgcagtcagatctaaggtgagaaccatacaactgaaatcataactgtttgtccttttgtgtccctctatatattttacttcagataactttttttttttgagacggagtttggctcttgtcacccagctggactgcaatgatgtgatctcagctcactgcaacctccgcctcccgggttcaagcgattttcctgcctcaacctcccgagtagctgggattacaggcatccgccatcatgcccggctaatttttgtatttttagtggagacagggtttcaccatgttggccaggctggtcctgaactgctgacctcaggtgatccatccgcctcagcctcccaaagtgctgggattataggcatgagccaccgcacccagcccagataacttttcttacataagtaatacatatctgtttggggaaaatatacaaaatacccaatccacaggaagaaagtaaatatcacctccaaactctactcagataaccactaaaaacattcttataggcttcagtcttttcctttggcttaatatatatagatgcatgcatagatacacatacatacacacacacacagagagtgagagagagttaatttgttgcctgcttttttcttagcagggtatcacaaacatgtttccatgtccataagtattttctttgtaaccatttcagtgaccgtatactatttcactgtgtggatggatcctaatttagtgagcaagttcctgttgtgcagttggtttcccacagtgtctgtccatctgtctgtgtgccttcttccccctctgaatcgccacacatctcgaattgtagttccatggccttaggcattagagtctgttaagcattctaccagctcactggccaagtactcagtaagggatgtctgatgatgaatacctttgacttttcttgttccaggacagcggggattttcagtttgattgacaccctgtggcccccagcgatacctctgaaaacacctggccgcgaccagccctgtgaagaggtaagcccggcactggaaaaacttccccagtcacagactactccatgccaggtgccaagccaggcgtcatcactgtcactcacatggtctgtgtcccctgctccagtggcaacaaggagcccccatgcagtcagttcctttgtagtgatgcatgaatatgagccaggattgggattcaggtgcctggagaccaagctctggctgccttccctactgtgctgcacagcattttcttgaagttaacttatgatgaatgcttaaaccacaaccctcacatactgttggaacagttggggtctcagccttgtactaaagtaaacatatagaatttttcccacgaacttctagtcattcatagaaccaacactcagttaccaattggagcaggaactcaatacaatccatagacattcgtacaacgtcctgggtagccaggaacttccattgtcctgcttgtttatgagagtgtctcagaagcagcaaaatggatggaaagtgttccctcctctccctcctgagccttttccagcaggctagccagctgctgctttgggccagaggtcccaaaacaaaactggggctgtcttccttaggttgtggctgacttcttagtagtgctaagtctgtgaccctgaactgtgctaaacagcatagtagttgtcaaagcacacggtggctcatgcctgtaatcccagcacttgggaggccgaggcaggcagatcacctgaggtcgggagttcaagatcagcctgaccaacatggagaaaccccgtctctactaaaaatacaaagttagctgggcattgtggctcatggctgtaatgccagctactcgggaggctgaggcaggagaatcgcttgaacccatgaggcagacgttgtagtgagccaagatcgtgccattgcactccagccaacgagagtgcaactctgtctcaaaaaaaagccatttctagattacttaagaggaagtaatttctagatgatattttcagtataccccgaaagatttctaaaatgaaaccttgaattaataggttcataagtatggaagttcttatagttggtcccagaagtaaacaatgcaatccattccttgtatagcattccagagagaggatgcacctgtaagcaaatatgtatatattaaagaggagattttaataatatctcctctttttgagtcttttaacaatacattcaccttctacctttgtctcatttaaacagataaaaactcatctgcctcctccagccttgtgttacatcctcacagctcatccaaatctgggacaaattgatataattgacgaagaccccatttataagctttaccagcctccagttacccgctgcttaagagacattctccaggtaatgtctttgtttctaacaggttttttaggtattggccacgtctgtgtgcttcgtgtaatgctgccaaccttttctaattcctttccagatgaatgatcttggtacccgttgcagtttctatgccacggtgatttaccaaaaaccacaggtaataatctctctcaatctctcaatctctcagcctttctctctctctctctctctctctctctcacacacacacacacacacacacacacacacacacacacggtgttagaggtttattaaagggtaatctcctttggaaattaatgcattgccaaaacagagaagtgtttttaaagtccagttaagcatgccccatatactgaagtggcagtaaatccattccttttacagatgcagactaccagccactgtgctaagcactggggtgtaagacacccaggtacaaccctgtccccaaagcttctcagcccagtaatgttcattctttcccgacacttaggcaggttgaagaaaggaaagagatggagaaacctcatttatgtggtagaagtgggaatctcaggatcgagctcagctacttctgggaacttttagagccttcaaaactgaaagcccccccatcccacctccatggtccctgtgaggccttgggctgttctagggagcagtggcctagaggagcttgctatcaatcaactaggagtagaggagggaaggagacctgcttgccagtttgaatgcatggactacattctgctagaaacctctgccagcccttaccttatggaggaatatccatgtagatctaatcacccaagagggattgagaacatcctgtttgttaaactcttgtccactcatgggcaatgtgcaccgggtgcatctgccatggtgcaggagagagtgagtgccccacacattgcctccttgagggtgtgtatgagtggagcaaaccaggccccagatgcctgcactcacctgggctgtcggtggatcaccagctaccagccaggccagaatactcaggaattgcccagcaagcagtctcaagggagggcaggaggctggcaccttggccagcaacctcggccaggtgccccagtgcaccacgagtcgggggacagtggtgggggtggcaccaggggctgtcttctaatcatactatgcctggttatcaagatctgacactcacacccctcacttttctttttgttgctgaagtatgctaaagcacacccagacctcatgccatttcaccccgacacgcttgttaggaatctcttcaaagcattcatggttgcatacaacccaattcagctgcctggttttggagcctttctcttccgcttaagttatccagagttattttctgttgtgcatttattttgaacaaattctttgcatttctctgatcattcttcgacagtggaagaataagagagtgactaaaagaatatgtttcataacttctagtcaagttcttgatgaattgcatatatacgagtatcattaaatcagtgttatcacaagcatgttaaatcaacttctcttccatctgcatcaggggtagtgggcagactgtttctgtaaagagccagatagtcaatattttaggcttcttgggttgtatggttttcatagcaactactcagctccaccttgcagtgcaaaagcagccatgttgtcattcacaaatgaatgagcagggctgtgtttcagaaacctttatttacagacaccaaaatttgaatttaacttaatttttacttgtcacaaaatattcttacggttttttaaccatttaaaaatgtaagaaccttgaataaacataaaaaccatacttagcttacaggcctagcccacaggccatggtttgctgacgttcttcaggtgctgagcatggctggaggacacaggaactctgacgcagaaagaaaaacaacccaagtgtctcctggtgtcccgtaggttgtactgaatgcacagtgcggtgtgtgtcagggagaggagacggggagggccatctactgacggccaccgagtaggatgcaagcttgttacctaaggatgccataggtgctgcgcaagaacacagcgctgatacatatgatcgtcatatgaaagtactttaaggctttatctcaatttaatttttacatttcagatgtaaggagtgtgctttaggtgatatgttagtaactgtcaattgcgtttcctttccttctctgcagaaagtgtgtgtgtgtttctgcagcttaacctgtggattagctagtgcttgccagcacatagagtcttgcccacagaaaggaaatcagagggctgagttgtgaatataaacgaaccacatttagctctttattttttattatcaatacttcaccacctttaattctgtcagagatttttcagattttcaaaccattctcatgtacatatcattttatctcagcagcaatagtgtcactgttcctaattccaagtggagaagaccaaggctaggcctggttatctgctgtctctgatacacacaaccaaaccctggtggagcctggtgtgggtttcctgactcttactcagcccagtgtcccctggtgcttcctggctccacggtccctcagttacctggtgccctggggggtggggggnnnnnnnnnnnnnnnnnnnnccccccccaaccacatgctgactgagcttgtgcaggtacttcaccgcgttgtctcatgtccttgtctgtcaaatgggtgtaacattctctcaccatattggattgttctaggatgaatttaggagttttgaaataccctttttcctttgttttctcttcatctgttccccttttcatcatttgacagctgatcagtgcctctcatgaagaaatggagaatgattggcatgagtccctcagtggtgctccctgtgagcaccccagtgtccggctcaggagataggaggatagggctcccagcaaggacgaggcagggcacgtgctatgtcccatactttccaagcctgaggagacctaagactgacttcacgctcctctgcctaccttgagaggggtcagtgtgtgtagggatgcccctggcatctggcacattcctgctcttctgggtcatgggccaggcggtggctctctgtgcaggtgcctttcacccatagggagaatgctgtcctcagagcagccacgtggcagttgcagctaacactcctgcccacggccctctggctgagaccgaggttgaaagtaaagaaagcaggtgtcaaaatgcttgcaccaaagccagttggaggggagctctggggcagagaaagaccaagagtgaagcaggtcatccaccttgccctgtgaaggggtcctccctcagggaggtagagaagataatgttaatcccctcctatccaagaaacaggctcccaccagtgccaagtgcagctttcagtgagcatggcttccagtgggcatgtgtgcctaggaatcagtagtcctatagccacaaaacagtcaaagacctggaacccaatggaacaggttccatgatccactgaaattctgtctgtctcctatagtctgcttttgtgtgtaaaagaatcaccagaaaccagctgtctcaagaaggaatagaaataagctgactcctggggccagtccgtagttaagccagtggcctgcatccttggcagtgagggttgactttcagaatggcaccatgagtcattgctggaactccagtcataaaaacagacccagactaggcgtggtggctcacgcctgtcatcctagcactttgggagactgaggctagaggatctcttgaggccaggagttccagaccaacctggtcaacaaagcacgaccccgtctctacaaaaaaattaaaaattagccaggcatggtgctgcatgcctatcatctcagctacttgggaggctgacatgggaggatcccttgagcccaggaggttgctgcagtgagctgtgattgcaccactccactccagcctggctgacagagtgagaccctgtctcaaaaaaaaaaaaagcagattcagttgtatttccgttacactaatgactaagtcatgaaggtgaaaaagatagttttcatatttaacttttattttgtaataattatagtttcacagtagattgcaaagaaatacacggggggtctggtgcacccctccacccccatgtcaatatcccacacccacagtaaccacagtaaaaaccaaaaccagctgggcgcggtggctcacacctgtaatcccagaactttgggaggccaaggcgggtggatcacaaggtcaggagattgagaccatcctggctaacatggtgaaaccctgtctctactaaaaatacaaaaaaattagccgggcgtggtggcaggcgcctgtagtcccagctacttgggaggctggggcgggagaatggtgtgaacctgggaggcggagcttgcagtgagccaagaccacgccactgcactccagcctgggcgacagagtgagactctgtctcaacaacaacaacaacaaaaaacaagaaactgacacaggaacaatccatggagcacattcaggtttcagcagccacgtgtgcactctgtgtgtttgtgtgtgtatgtgtgcgtgcacttcttgcagttttgtcacatgtacagccttgcatcactgtcactgcagtcagaatcctccgctgtgccatcaccaacgattcctgtgttcgcctttatagccacgtcgatccttttttcatccctagcgctggcaaccactcacatgttctctgtcattataattatgttgtcttatggttgttacatgaatagaaccatgcagtatttatctgtattagtttcctactaggattaccatataaagttccaaaaactagatagcttaaaacaatagaaatgtattctctcacacttccggaggccagaagtctgaaatcttagcagtggccagtcgcagtgcctcacacctttaatctcagcactttgggaggctgaggcaggaggatcacttgaggccaggagcccaagaccaccttggccaacatagtgagactccgtctctatttaaattttgtttttaggcccagtgctgtggctcacacctgtaataccagcactttgggaggccgaggcaggtacatcatctgaggtcaggaattggagatgagcctgtcaaacgtggtaaaaccccatctctactaaaactacaaaaaattagctgggtatggtggtgcacgcctgtagtcccagctacttgggaggctgaggcaggagaatggcttgaacctgggaggcagaggttgagtgagccaagatcgctccattgcactccagcctgggtgacagagtgagactctttctcaaaaaaaaaaaaaaaaaaattcattaaagaaatataaggtgtcggccaacagtattgtctagagattcatccaaaggactaataatgttgaacatcttttcatgtgtttacttgccatccatatgtcctctttggtaaaatccctgtttacatcttttgcctattgtctaattgggttgcttgtttgttggtttattgttgagtctttaaagttatttctattttttaaatacaaaacctttgtcagatacaggatttgcaaatattttctcaggatctctaaattctatttttatccttttaatgatttttcttaacatagtagaagtttttaattttgatgcagtcagatttaccagatttttctcttacagatcacagttttgttgtcaagtctaagagaagtcaagtctctttgcctagtcataggtcccaaagttattcttttgtgttcttttccagaagatttaattttacactttaccttccaagtccatgatgcatttggagttgggttttgtataaggtgtgtggtttaggtcaaggttaattttttcacctttggatatccattcattccagcaccatttgttgatatatcgtccttcctccattaaattgctgttgcacttttgtcaaaaattaattgggcatatttgtgtgggagagatctattttttcctgataaatttgcattggtaatatttttgccttattactagcattataggtgtctatatcatctatgcttaaatacttttcctgggccggacacggtggcttacgcctgtaatcccagcactttgggaggccgaggcaggtggatcagctgaggtcaggagtttgaaaccagcctggccaatgtggtgaagccctgtctctacaaaaatacaaaaattagccgggcatgatggcaggtgcctgtaatcccagctacccgggagtctgaggctggagaatcacttgaacctgggagacagaagttgcagtgagccgaaattgtgccactacactccagcctgggcgacagagcgagactccgtctcaaaaacaaacaaacaaacaaaaaactttccctgattacacagggctataaaaatttttattagacttttttcttttagagcagttttaggttcacagcaaaattgagaggaaggtacagagattttccatacaccttctactcccacacatgcacagcctccccattatcaacatccctaccaggacagcacattgctcacaactaatgaacctgcattgacacatcgtactcacccagagtccacagtttacatgagggttcactcttggtggtgtaattttatgggtttgcacaaatatgtaatgccatgtatctacgatcatagtatcatatggagcagtttcagtgacctaaaaatctgctccacgtgtttattccccctccccacaaatccctggcaaacattcttatttttaccatctccatagttttgccttttcagaatattgtataaagttggaatcttagagtctgtagcctttcagacggacttctttcacttaataatatgcatttaagtttctgtgacttcatggctagatagctcgtttccttttgagtgctgaataatgttccattgtctggatgtaccacatagttcagtttagttattcattcacatactgaaggacatcttggttgtttccaggttttggcaattatgagtaagaagactttttttttttttttgagatggaatctcactctgttgcccaggttggaatggagtgacgcaatcttggctcactgcaacctctgcctcccgtgttcaagagattttcttgccttagcctctcgagtagctgggattacaggcatccgccactacacccggctaatttttgtttgtttgtttttgagatggagtctctctctgtcgcccaggctggagtgcagtggcatgacctcggctcactgcaacctccacctcccaggttcaagcaattctcctgtctccacctcccgagtagctggaattacaggcatgcaccaccacaccagctaatttttgtatttttagtagagacagggtttcacaatgttagccaggctggtctcgaactcctgacctcaggtgattcacccgcctctgcctcccaaagtgctgggattacaggcgtaagccacggcgcccagcctaattttggtatttttagtagagatggggttttaccatgttggccaggctagtctcgaactcctgacctcaagtgatccacccaccttggcctcccaaagtgctgggattacaggcgtgagccaccatgcccggccagagaagaaatctatttttaataaacttttagcaatgtagtggtagtactagtactgctttcattagttactgatgtctttttacagataattttattgttactgactttgttcataaccccaatagtaggacaattttatagttaatttcaaaggagattagaacattttggtatattaatagattgaaagagagaccactggccaaatccagagtatttacaaaagcatctaaaatttttggacattttcagaacctccaacctcagataatcttacagaaatctttgcccttcctgaaatattcaccaatttttttttttttttttgagatgctctgtcagtcaggctggagttgcagtggtatgatctcagcacactgcaacctccgcctactgggttcaagcaattctcatgcctcagcctccagaggagcaggaattacaggcatgcaccatcacacctagctaatttttatatttttagtagagacagggtttcaccatgttggccaggctgctctcgaactcctgacctcaagtgatccacccgccttggtctcccaatgtgctgggattaccacgcctggccagagaagaaacctatttttaataaaattttagcagtgtagtggtagtactgctttaattagttactgatgtctttttacagttgatttgattgttactgactttgttcataaccccaatagtagagataatttcataattaatttcaaaggagattagaacattttggttcattaatagattgaaagagagaccactggccaaatccaaagtatttacaaagagcatataaaatctttggaggttgtcagaactcccacccacagataaccttatagaaagctttgcccttcctgaaatattcacctttttttttttttttgagacggagtttcgctcttgttgcccaggctggaatgcaatggtgcaatctcagctcaccgcaacctctgcctcctgggttcaagcaattctccttccttagcctcccgagtagctgggattacatccatgtgcctccacgcctggctaattttgtgcttttagtagagatggggtttctccatgttggtcaggctggtcttgaactcccgacctcaggttatccgcctgcctcggcctcccaaagtgctgagattacaggcatgagccaccacgactggcccactaatttttttaattttttttttctttgagaaggcggtcttgttctgtcatccgggctgtagtgcagtggtaccatcacagctcactgcaacattgacctcttgggcccaagcaattctcctacctcagcctcccaagtagctgggactacaggcactcgccaccacacccagctttattttattttttgtagagatggggtctcactatattggcccagctgggctcaagtaatcctcccgcctcagcctcccaacgtgctgggattacaggtatgagccactgtgcccagcccacttattaaatatcagtatggaccaatgaattcatcttttattcagcaagttatatctattactgtattcattttgatgctcaattttaccatatttaagctggttcctgtgtcctttggacacatgcccgtcattctttgagtacctccttattttctgacacagtaagatgcgtcaaactcatcttttgctttctgtgctctggagtcagccatcttttcaagaagctctggttgattttaatggagaatggctttttggttttggggtttttttagttttagttttagtttttcagagatggcatcttgctatgttcactacgctgaaatgcagtggctcttcacaggcatgatcttggtgcaccacagcctcaaactcctgagctcaagcgatgccctcacctcagcctcccaagtagttgagactgctcctgagtcacttgtgccactgtggctggttaagaatgttacttagaagccaagatccgggttctaggtgggcttcctgctattgagatatcattgcctctctgccctctcagtggacagaggaaggaaatgtgtgtgtatattcatccacatacacacacaactatatctacttctatatttctatctatctaaaatcattatttcataccaatacttccaactctagatcattaccacagaatttattctaagttttcttatttctatatgtataactcgcttctccaacagtaagaagcttggcttcattttcctcaatattacttattcatacttcctgtatataatcaacctcctgacaatgtaggccacttccttcaccccaaccctcagctacgcaccacacaagtgaccttctctgcccagtcctgttaactggccatgtggaattctcagcctgaccacaccgtctgtgccagcaacaccagctgaacctccaactggccacatcctcaggccctggccctgctgaccatccttggccccatttgcgtctactgaatcctaagccctgaccaaaaggaaagggcagaataccagtctaatggaacttgaaaaggcattacaagttttgaagataagaaaaaaatgaaaaaatatagaaggaaagaagaaaagaaaataataaaacctgttgcagatgcaacaaatatgcgacaccagctttataccaaggccctgtacaaagtctgagggcaagtaagatctgttcctaaccctcaggaaacttacaactggctggaaagaataatatgtatgtactacacaggaaacaatgttgtaattaacattctaagtatataaacagaggatcaggaggaaaagaacaatggattcagcctgaggatgtcagtggacaaatggaatgctgccagggaagggtggcctgttcccaaccaaggaagcctttaaccaggtgcaaagtcgaggcacccagggcacatggggctagtgaccaagatgtgcaaagtctagtgtatgttttaaagtgtttttgaaataatatcttaaattgttagtatatgtataacttctgcttttaaatgcttttaaaacattttttggtataataattaatctttattgtgtcttcaaattgtagctgaagagtctgctgcttctggagcaaagggagatctggctgctagtgaccgatgtcactctgcaaacgaaggaggagagagaccccaggctccccaaaaccctgctggtctatgtggcccccttgtgtgtgctgggctctgaagtcctggaggcactcgctggggctgcccctcacagcctcttcttcaaggacgctctccgtgaccagggtgtgcttgcgtctccacagctttgatgcaggggcgactgatccgtgcccatagaatacctcttgtggcctctggatgcctccttgttgcttggacgctgccggcaccttcacggagcccatcacagacatggcccatgtaccagcctccagccttcactgaccctgtagcagccacctgggcagaaccagctccatggagatgctgtgctcactccagaattgcctgctggtggcaccccatactgctgcagactccacaaacaaaccaaaagctagaatattataaatgcgtatacttagatcagccagcccctttttccagggatcaaactaaaatcctgcctcagctatcttttttaatttttattgagtcataattcacatgccacataatttaccctgtgtggattgacttgaatctcacatttgagtgcttttttagcttagctcatggggttcaggagtgtgcacacacaatgaacgtgctgctggacacagtcccataactgcaccttcacctgcatgactcgaggggtagcaaaggagactgccattatgggcacaattcactttttcttcaaggcttcaataacctgaagtgtctctgtcggcaggtcggattgtttgtgctgaacgaactgtcctcttgcttcagaagccccttttgagtgtggtctctggtgcaagttcctgtgagctgcctggcccggtgatgctcgacagcctggactctgcaacacctgtcaactccatctgcagtgttcaaggtaggcagccatctcacaggaattggtgcttatactttcttaactgttatactttatattcatttactcatttattcaacaagtatttgtggagcacccgctaagttccagacactggatacataaagaacaaaagcagaaattgttcttggtatcagactcgagtctgcacagaaagatgtgaatcagacgaacacagacaggcctatcctcaggctctgagtgctctagccgctgataacctgggcccacgtcttagtggggaactcagggaaggcttcccaaagacaggagcctcaagctgagctctgaagcatagatgagactacttaggtcagggatggagcaggaggaacattcctgggaagagagcaggacttcgtaaggccactggcatgagaaagttggtgagcaggggtgtctgggaagaggcaggacaggcagccagatggaggtgggaccaagctgaggctggtgggcccaccaggctggtggtgtcaggagtgtgttctgtcattggtacaggcggcctggtctgatgtcctccctgcagagcagagtggagggactgggtggcagaggtagagaaggaaatccaaggatggacttagggaaatcggcaggttgagcgatgaattgggcatagatggaggcagaagacatctgacaacctccgagctcctggctcagttgaggtaacagtggtgctgttcattaagtaggatgtggcaggcaaagtcagctttgaggggacctgctcagttctgtcgggagagtttgcgtgttttacatacatctgagatgtttcagtagctggttagatatgtgagtctggagctgaaaatagcattattattttctcttttttaactttataaaacttagtaataaaagtcatacatgtctagtggaactagtgaaaaataagagaaagttaacagcccaccctctgtccccggcttcctgcctgtgctggcgcatccaggagacacagctgcccgccttgagggtgtatgcgttcttgcaagtcaaatgatttactgcacattattctgccacttgcttccctctaggagggatgtccgtccaggtggggggagaggtcaaactcaagagtttaatagttgcatagcatcccctcatatgaataaactcttcctccactcatggacatccaggatctctcgtgtttttgcaattattaaacaaggctgtaataaacattcttggacatcaatctctactgatttctgtaaaggaggatttcagcggcttggggtttatggactttttaaacaactttattgagctataactcagtaataccctataattcactcctttaaagtgtttttagtattcacagaattgtgcaaagatcactacaatctaattttagaacaaaaacccatacccgttatcattcacgccccgttaccacccaccctcccacaccctagtcttaggaaaccaccaatctactgtttgcttctatgaatttgcctgttctgctttttgggggggttttttgtttttgtttttgtttttgttttgagatggagtctcgctctgtcacccaggctggagtgcagtggtgtgatctctgctcactgcaacctctacctcctgggatcaagcaattttcctgcctcagcctcccaagtagctgggattacaggcgtgcaccaccatgcccggctaatttttttatttttattagagacaaggtttcaccatgttggccaggctggtctcgaactcctgacctcaggtgatctcctctcctcggcctcccaaaatgctgggattacaggtgtgagccaccgcccccagcctattctggacacttcatgttaactggaataatatttaggctggtgcaaaaataattgtggtttttgccattaaaagtaatggaaagagccgtgattacttttgcacaaacctaacatactatgtgatctttcatgattagcatctttcaatcagcataaatgttttcaaggttcatccacaatgcagtgtgtatttcttttatggcataataacatttcattgcacagatatgccacattttgtttatcctttcctcagttgatggacatttcatttgggttgtttctactttttggctactacgaataaagctgctatgaatattcatggacaaggttttgtttgaacgcctgttttgaaatttggggtatgaatccaggactggaattgctaagtcatatggtaaccctgcatttttaacctttttgaagaacaccagtgttttccaaagtggctacactaggggtttgtgcctctctcttttttctttttttttttttttttttggagacagagtctgtctgtcacccaggctggagtgcaatggcatgatctcagctcactgcaacctctgcctactgggttcaagagaatctcctgcctcagcctcccaagtagctgggactacaggcatgcaccaccacacctggctactttttgtatttttaatagagattttgccgtgttggccaggctggtcttgaactcctgacctcaggtgatccacccacctcggcctcccaaagttctggaattacaggtgtgaaccacggcacccagccggttcaaagcatatcaaaattcagaattccgagcgtaatgtctaagatggctggtgttcctcacccttacctataactagttcctgactttttataattgataaacagaaaactcttgtgattccattgttgctttcacattcttttcactgtgttgaggccatttggattttctcttctgtgcatctccttttggggttaatgctaacacattactgcagttatggggtgatgggtcatatggggcctccattttctcatctgtaaaatagggctaacggaatcagcctcaaaacactgttgagaattaaatgagataatgctcaggaggctttgggggctttgaagctctgagtccagtggagaaaacagacatctcagtactggtaccaggagtcaggaagggagggagggatgtctgagggctgcagccactgactgcagagggtgggtggccttaggaccatcaggatttgtcaagtagagttgggcaaggctgtaagagcaggtggaagggcacatggaaaacccacagaagtgctgggagcagttataaaccctcccaagtgatgggagaggggcagggaccaagaagggcagcaggggacccagttgcttgtgtattgctctgctttccctggccatgtggagattatatggtcagattttttaatgaagaaattctgcagccccagagactgtgatgcaaagcagggagagatgattggcaggaagaagagggtctgcaggggtggagcagactgcctggcccacgtgagccagcgtggagctgctctttggtgtacagcagcactgtgtccctgagcagaccggctacagggacagggcatatggtgcagagggatgcagcctggtccctggggcgcatgtgctatttgtgtgcctttggcagtgacccatcgctcgcttccagggcttgctggtctccaggctcatgtataaggacatcccttccaccttcattctcttcactggttgctacctgttcttctcccaccccctcagctctcccagaggccaggattagtcaggggctcagggagaacatcccacagtgaaggtctcagctctgggtctgagagtcacagccatgccacaaaccagttaggctgcatgggaccctgttattttatgaccagaagaatcgccaccacccatagcagtgtctcatgagaaaatgtgtacctgaagaaccccaaggagggtttccctaacccattcctaactacggccaatgagtgccacaggtgcacacagaggcagatcctcaccttttgtgcctgtggcagtaggcctgcctgttggtacactgagggaactttgctctaggtggtcagatgcagcctcatgtgacttagtgcagtgacctccctgttgggcattagctgtgttggcagcagctgggaacactgatgaggctcagtcatccttaggccccaccttacttaaactgaaccttcaaatgggtgttgaaaactaaatatgtgtaatgtaatcaataggcagtttgatctgtcacaaagctctgttcctggtagcaaatttaggtgttctagagatcagcagttcagattcttaagcacctaaccactggaaggagagcagcacaagatgccattcctaacactcggctgctgccttcagacctctgtgggctttgctgagtgtaacacctttctaaaatgagagcagccctggggcacatgctgttggcaccctccttaatcaaaaacagctgcacaggtccaagcccagtgtccatatgccagacacattgaaggactctagaggctggggttccctgtatccagtccacccaagccacatttcaaagcttgtagccgggatctgtgcttttattccaaggtttgaatggacagtaacagtggaggcatgcactactaaagctacgtgcttgcctccatgtgcagtagagagggcatcatatcagtcacatacggagatcaaacacacatttgtcctttgctcatccaatgctgttcccaactaaaagcaaagaagcaagatttctaaacaggggaggaaacatgctctgattggttcatgtattttgcatgtattaagatgaaaattattttttttttctgtgccctcattttacaaattggtgggatcaacgtttctgactaagccagttgtatttaggcagtttttccttctcaaattcacttaagaaatatgcttaaactacttatctttggctctttttttttttcatttttctgtacctcattggaggcaagggctcctttttatttttttaacatgagcactagtcaggaagatgaattactatcctcatggtttaagtcacctttcattttttcattgcacgttgataaaactttattttataaagtgtaaaccacagtgagacattcagacattacctataaacttcattttcttttatagaaatattgaagaatagaaatacggtcttggccaagcaatggcaggattctttttttttcccctcaacttttaagttctggggtacatgtgcaggacgtgcaggtttgttaaataggtagacgtgtgccatggtggtttgctgcacagatcaacccatcacccaggtattaagcccagcatacattagctattcttgatgctctcccttcccctacgcagggctccttctaaatagagaaaagttggaaaccctcacaggtcttccctgtgagagagctgtgggtgaatactgaggtgaggtggtgagcaggaagggagtgggtactgggggaggtggcctgcatggcacagagacagcactaaacacaggcaccattggtttgccaatgagaagttctaggcctctcaacgtcagttagtaaatgtcctaggaacctaaagtcactttagtggcctgaacagggaagcagccctgccatcctaagcttcatagaaacgatgtaagtaccaggctgggcgtggtggttcatgcctgtaatcccagcacttggggaggccgaggcaggcggatcacgaggtcaggagatcgagaccatcctggctaacacagtgaaaccctgtctctactaaaaatacaaaaaaattagctgggcatggtggcaggcacctgtagtcccagctactcgggaggctgaggcaggagaatggcgtgaacctgggaggcagagcttgcagtgagccgagactgcaccactgcactccagcctgggcgacagagcgagactccgtatcaaaaaaaaaaaatagaaagcatataagcaccagttgtgtctggccagtctgattacggccagcattgccagcagctgggaatttgccttctccaagcagctacagctggcccaggcactgggctaacaaggggtgagtgccctaggagccaggctggagggaccaggggttcctactcctgggaaagccaagggagccagagtctcaatgctcctcacacccagggaagccagggcccccacatctcccacactgaaggaaaccagggaagccaaggcccccacatctcccacagtcaacccgcactcaaggaacccaatgctccttacatttacaggagccagggctcccatgccccctcacacccaggggagccagcattctctgtttgtgttgtacagttctgttggttttgacagatgtataataccatgtactaccgttaccattagtgtatcatacagaatagtttcaccaccctaaaaatcctgtgctctggctcttcatccctccctccccactgactactggcagccactcttctttgtactgtctctgtagtttggccttgtccagaatgtcatatagttggaatcatgcagtatgcaaccttttcagattagcttatttccgttagcaatatgcatttaaggttcctccacatcttttcatggcttgatagcgcatttctttttagcactgaatagtattccattgcatggatgtaccacagttttctggtttgcttccaagttttggcaattattaatgaggctgcaatagacgtgtgtgaaggtttttgtgtgggcataagttttcaactcgtgggtaaataccaagaagtatgattgctggatcatatgtttagttttcgaagtaactgctaagccgtcttccaaagttggctgtatcattttgcattcccaccagcaatgaataagagctcctcttgatccacatcctcaccagcatttggtgttactagtgttttggatttttgccattctaatagatgtgtagtagtatctcactgctgcttcaatttgcaattccttaatgacatatgacatttagcatcttttcatatggttatttgtcaacctctttgatgatttgtctgttcaaatcatttgcccattttttaattgggttgttcattttcttattgttgagttttaagtgttaacagtccttgatcagatgtgtcttttgcaaatatttttcccagttcatggcttgtcttttcatacttttttttttcttttttgagatggagtctctctctgttgcccaggctggagtgcagtggtgcagtcttggctcactgcaacttccaccccgctggttcaagcaattctcctcccttatcctcctgagtagctgggattacaggcgcctgccaccatgcccagctagtttttgtatgtttagtagagactgggttttgccatgttagccaggctggtcttgaactcctgacctcaggtgatccacccacctaggcctcccaaactgctgggattacaggcatgagccaccgcttctggcccttttcatactcttaataagtctttttgcaaaccataagttttaattttaatgaagtctcacatcagttgtttctttcacgaattgcatttctggtgttacatctaaaaactcattgtaaaacccatgatcatctagattttctcctgttttctttctaggagtttcgtgttttacatttaagtctatgatccattttgaattaatttttgtaaaagatgtaagatctatgtctagattcatttttttgcctgtggaaatctagttgttctggcaccatttgttgaaaagactgttctttctccattgaaatgtctttgttcctttgtcaaagatcaggtgactatatttatgagggtctgtgttcccttgatctatttgttcttttgctaccagtacaccatcttaattattgaaacttttttttttttttgagacagagtcttgctcagttacccaggctggagtgcagtggcacgatcttggctcactgcaagctccgcctcccgggttcacgccattctcctgcctcagcctcccaagtagctgggactacaggcacctgccaccatgcccggctaattttttttttgtatttttagtagagacggggtttcaccatgttagccaggttggtctcaatctcctgacctcgtgatccacccactttggcctcccaaagtgctgggattacaggcgtgagccaccgcgcccggccaattactgcgacttttaagtcttgaagtcgggtactgtcagttttccaactttgttcttgttcttcaatattgtcttggctattctaggtcattttgcctctccatataaactttagaatcagtttgttgatatccacaaaataacttgatgagattttgattaggatagtgttgagtctgtagatcaggtggggaaaaaatgacatgttgtaatactagagccttcttatccatgaacatggaatatctttgcatttatttatatcttctttgatatctttcagaagagttttttagttttcctcatacagatcttgtacatattttgttagatttatacctaagtatttcatttattttgttgctattgtaaatagtattatttttaatttcaaattccaatcgttcattgagtttcataggaaaacaattaactttttgatattaaccctgcaactttgctgtaatcacttagtagttccagtggtcttttgttgtttctttgagattttctccatagaatactaggtcatctgtgaacagttttctttcttccttctcaatctgtgtatcttttattttattttcttgtcttactgcattagctaggactatcagtaccatgtagaatagcagtagtgggaacatccttgccctgttcttaatcttaagggttaaccatgtattttctcaccattgattatgatgttagccagaggggttttgttcttccatttgctggagatagtatcactttggaagaaaataatattagctctccttcccttcttttattacactcttcttttccatctacctacctttgcatctgcactttatattgttaagattggtaacattctgttgtataactataattaagctttgcacacattttctacagattgattctcaaagatgaaaatcattctatacaagttgagtatcccatatccgaaatgcttggaaccagaaatgttttggattttttattggttttttcatcctttttttttttcttgagatggggtcttgctgtattgtccaggctgctctcaaactcctggccatattttggttttaatatttttaagacagcatcatccaggctggagtgcattggtgtgatcatagctaactgcaaccttgaactcttgagctaaagcaatactcccacgtcagcctcccgagtaactaggactactgggatggcacacaccaccatgcccagttaatttttgttgttgttattgttgttgttgttgttgttgttgttgacacagagtttcactgtgttgcccaggctgctctcaaactcctgacctcaagtgatcccccggccttggccttccaaagtgctgtgattacaagtgtgagccattgtggctagccatgtgtctttatataaacaacatatagttggttcttgttttttgttcactccgatagtctctgtcatttaatttgtgtattgagaccattctcatttaaagtgattattcatataactgagataatatcaactgtatttataactgttttctattcattgacccacttgtttctttatcttccactctctgcctattctgatttttattgaacattatgattccattttctcttttctttcaaaatatcaattatacttttttttttttttttttttctggagaaggagtctcgctctgtcgcccaggctggagtgcagtggtgcgatctcaagtcactgcaagctccgcctcccgggttcatgccattcttctgcctcagcctcctgagtagctgggactacaggcacccgccaccatgcccggctaatttttagtatttttagtagagacagggtttcactgtgttagccaggatggtctcgatctcctgacctcacgatcctcccaccttggcctcccaaagtgctgggattacaggcgtgagccaccacgcccagcccaattatacttatttttaagtttttctagtggttaccctggagtttgcaatacactttacagccaatcaagtccactttcaaataacactgtcctgcttcacaggtaatgcaggtaccttctatcagagtgttcctgatttcttttttttttccttcccatcccttgtaacactcctgttatgcatttcacttactcaaaaggtataatcattgattacattatcattattatttaaataaactattatcttttctatcaatttagaattagaaatgtaaaagattttattttaccttcatttattccttctctagtattcttcctttctttatatagattcaagtttctgacatttcattttcctcatatctcgccattttcatgtagcattccctgtgggcctcttctgcttccgggcctgttctacagctgccctgcaggccctcatgtagggttcaagatttgtaaacagacttatcacagaggcagggctgagtgctgccagatcctttaatgagaaccagtcaactaggcattaagagaaaacaaacccccagctgcaaaataacaaagattatccaagcctcacatgcaggaatgtccatagcaaggtagcagctaggcagtgacctactcctacacagtcctcagcctgcacacccaccagccacaggtctgcccacctccatcagatccaggcaaggctggagtcctcactgctgtttggcaatagcagttgcccccatctcagcacctcagatttgctctgttctgctctgccctggtccagaagatctcagtgatgacatgtccgctgcatggctccaaggggaccccttcacatctgcagagagttggtgctagggcttgggcagctctcccagcagctgaaccagctgagcatctgggtctcagatggctgagtactgaacattttctctgagcagagtttaaaaggaccctgaatatattctgagcatggagcagtcactcactgagagctggcagcatccctctgtccatccaggtctcagtgatggggtgagggggagacactcactccttgctggtgtcacaaggcctcctcgtctctattctccctgagtggcagctctggggtgtgcggaaatgtttctctgctgtgtcttctggggtgaagtcgtttggcagcgctggttttccctccctcactctgctcaccacctctctgtccaccactcactagcgatgggacctggtgcagggctgtaggaagggatgcagcaggctcacatctctgtggaaagaggggtgaagtcctatctaaacccaggctccagcttctaaatagaagacttgtgagccctgacttctttccatcaggagatagggaggaagagggtatagcagagttcaagttactgaagaaatgtgtgcaccaggcgtggtgagcgccagacccacccatcctgaggaccctttgaaaggacctttttaaaaagatgtgtttgtaactaagcaatacacctttcccaaacctaattacaagacatttctgcacataagacaagcaaactaaagacttaatggcaaactgctggcaagttcatgagtatggtgtcctcaaccctgatgtaaactatctttttctttctgatgctcatttaagtgaatgtcttttgtttttgtttttgtttttttgagatagagtctctctctgtcaccaggcttgagtatagtggcgtgatctcggctgactacaacctctgcctcctgggttcaagcgattctcctgcctcagcctcccgaggagctgggactacaggcgcgtgccaccacgcctggctaatttttgtattttcagtagagacggagtttcactgtgttggccaggatggtctcgatctcttgacctcgtgatcctcccacctcggctgcccaaagtgctggaattacaggcatgagccactgtgcccaaccttaagtgaatgtttaatcatacacttcccagccatctcttgaaatttatttagggttgccagaaaagatttccacaatggcttatggacctcagatgaaatgtatttcctcaactcttgccttattctctaattggaaggaaattgcttaatcccatataaatgtaaatgctattaacacccatggatatcctaggataaaaaggaactttggctggtagcagtctactttttattaaggtagcagtcatttaccaaacatcagtaaaccagtgagtgggcctttggtgggcctgcaggccctgggcaggagccaggccacagtggcagatgtgctctggggcttggggatgccccggctcctttctccacttgcacctcctcatgtgcctgcccattgtgaattagtcaacactgctttccagctgcattacgagcctttattgactttgcttttcatccctttgacccactttgacaatgtcattagctagggcagccttttcaaaatcaagatctattattttcatttttaaaaagtcattcaagtatgcattgcatgaatgcactttaataaaccaagcctactcattctcatacttctgttttatcctctaaagataaattttctcccaatgctggttttagtgaggaatgaaattttttgtgccaagagtggaaaggaagacctttctatttttctagaaactcagattttactttttcttcaaacatctaatttcaccgcttttcaacaaggacatctgcgatttggtggtgtatctagatgatatctacaatgcttcacatccaagaaaatcagaccatcccaatccccagcaagcactgaccaactgtgctcacccggcctcagccctgccatggtgtgcagagttggctgaggccccgtgtggcccgccctggctgtcttgtggacccccctcactcccttcctcaggaagccatgaccctctgggatgcccagaggtgtctttgacacacgtctcaggtgtcttttccatttgtcaattcaccatttatttcatcttttttttggggagtggggacagggtcttgccctgtcacccaggctggagtgcagtggcataatcatagctcaaacactcattactgtgttaaggagtctatatactactactgtgctacagaaaaagcacagacctaaatatgcaatatggggaatgtttgagggactgagggccggctcagctgtggcgatgtaactacctatgcatctggaaaaatatcccaacaaaaatacttcagttaggtggtaatatgcaggcaagttttaaaacgtacttcttattgttataatttttctttgtacaataagtggaaattataaaaatcttaggaacatgtatataaactcccaagtaaggcaaaaatcacgaggcccctcatgttgtcctctgcacgtggaggagcagaggagtcagagagggcagagccgcctctgaggtgggctttccttctcttgggcctaggcactgtggttggcgtggacgagagcactgctttctcatggcctgtgtgtgacatgtgtggcaacgggagattggaacagaggccggaagacaggtaaggggacaggagctgtcctgaaagccctagaactgaaagggcacagaagcaacccagccccagaacctgggccttgctacctcaggtgactccctcgagagctcaaggggcaacctctgcctctgctgagcagcaagggaagaggcctctggggcccagtgggttttccttactgagatttctgctgtttcttgcagctgctcctgttatgagatagatgtgctgggttttgtccccacctcctttattatcagccaggagaattaaaaaaacaggacaaacatgaataagtgaaaaaaacttggtgactgtatagcctagcttttgtgaaaggtgcagacgtttacagagaccacttttacagtgagcagctactggacagatgtccctgcccaccccactatgctgccctccctcagggtctgggccagtgtcagtgcagtctgtccctatgaagtcagtcctccggcctcccaagtgcagtgtcatgtgatagaaagggacaggctcattacttttctgcttcttaaaaagcaaagagactgggcatggtggctcacgcctgtaatcccagcactttgggaggccaaggcaggcggatcataaggtaaggagatccagaccatcctggccaacatggcaaaacccagtctctactaaaaatacaaacattagctgggcatggtggcgcgtgcctgtaatcccagctgcttgggaggctgaggcaggagaatctctcgaaacggggagtcagaggttgcagtgagccgagatcacaccactgcactccagcctggtgacagagtgagactctgtctcaaaaagaaaaagagaaaaaaaaaagcaaagatcggccaggtgcagtgtctcacgcctgtaatcccaatactgtgggaggccaagtggatcacttgaggtcaggagttgaagaccagcctggccaacacggtgaaaccccatctctattattaattttaaaaatacaaaaattagccgggcatggtggcacacacctgtagtcccagctactccagaggctgaagtgggagaatcacttgaaccagggggaggtggaggttgcagtgagccgaaatcgcaccactgcactccaacctgggtaacagagagagagcgagactccatctcaaagaaaaggaaaaaaaaaacacacacaaagcaaagagcaaatgtctccttggcatatctgggctggtggccttacacaagccatcactggactgtgtggaagagatgagcacatgtgcaggcatgcagggtagcacacaacagtggctgtgctggcagctgagagcagactttctcttccgggccagggggcagcctgacccctggcctcccaggccctgacctcccttcctgggaggctcagcatcccctcctctgctcccctcttcggcctccagccagtgctactcgtgctactcgaagctaatgttcatcccttggacaggctgagtccaggcagctgcaggcctctctcagaaacttgattctgagagtaaagccccgttttctagctcagcagacactcatgtttaagaaaatgtctcccactggagctttcctgacttgtgcctcccggggccttgtctttccttggcttttcatataccagaggcgccttttcctgtggggactgctcccgggtggtcacatctcctgttctcaagaggcacctgcaggtcttcctggactgccgctcaagaccgcagtgcagagtgaaggtcaaggtaggagccaggccagagcacgcacgcactcctagctcactccaacatagcgaaggtgagacagagctgaagcaggtgcacgtcctcctgtacgcctgcagaggcgctgggactcggctgggatggcttgcatctggaactccctctaggtcctaggagcttccctaggaaaggtgggaggatgcaccctatgtgaacacagtctctccatgttaaaacacatctttgacctaaggccgtgagactgaagctctgaagacaggtggtttggatataacatgttaattttcgggaatgagtgatttaacttgagcacttactgtgttggagggagtttaacccagccctgcttctgctgttgcagctgttgcagcgcagcatttcctccctgctgaggtttgccgccggtgaagatggggtaagtgcagggggcccagcccagggggccgcacactcagtagcctgcatgagcaactcatccccagaggaagcccccactcccaaatgtgttctattacaacccatcccactaggaagtggtgtagacactcgagagtgaaatgcagatatgtctgccattcagactgataggttcctttcctctgtggaaatgaggttattttagatcattgttgaggtagatgcaggaatctgtcccctggcttttttgtttgtttttgtttttgtttttagacagagtctcattctctgtccaggctagagcacagtggcgtgatctcagctcactgcaacctccgcctcccaggttcaagcgattctcctgcctcaccctcccgagtagctgagactacaggcatgagccaccactcccagctaatttttgtatttttagtagagatggggtttcaccatgctggccaggctggtctcgaactcttgacctcaggtgatcctccaaccttggcctcccaaagtgatgggattacaggcatgagccgctgcacccagcctgccccctggctttgattacagcaccacagtcttcaggttggagtcctactgccaaggtgtcatgttaataggatggaattccccaagatgcttttttttttctttttttaaacactgggtattccagactctgaataactggtaatgtgactgtcctgccctgagagtcactgtggtgaatcttagtaaagcagggtggctcctccaagaaaagccacctaaatatataattgatgggccaaagagtttctgctgtgtgaaatttgacccacataaatgagacatctgtcctagagatgccacctgtgtcttgtgaaagccatttaaaagcaccacaagtggctcatggaatagccacagaaggggaccagccactcagtggcccctgggcacagccccagttcacaagagacatctggaaccagagtgggctccacaaccagggagctgacttgggccacgctggaagggagtgtggtgactggggaggccgatcatgcctggagctctgtggtcagttaaataaggggtctttgtctaatgggtccccatggccagattctagccagaatttttttttaggcagagtcttactctgtcatccaggctggagtgcagtgacacaaccataagctcactacagcctcgaactcctgggctcaaacgatccccctgcctcagcctcccaagtatccaacccacatttgtggtgacttgacctgtcctatggagactcctccctgccccactacccctgccaccctctcacccactgcacctcaggaggggccagcagccccgcaaggcagagcagcagtttgtcctctctcatctaaaccatgtctgtcagagttggattaaattggaacatggataagtctatgagcgggatctttgaggatcacaagtgactatacactagaattacctgcaagctctaaagagtttctgctcttggctgggcatggtggctcatgcctgtaatcccagcactttgagaggccgaggcgggcggatcacctgaggtcaggagttcgagaccagcctggccaacatggtgacaccccatctctactaaaaatacaaaaaagctgggtgtggtggtgcgcatctgtaaccccagctactcgggaggctgaggcaggagaatcactggaactggggaggtagaggttgcagtgagctgagattgtgccatactccagcctgggcgacagagcaagactccgtctcagaaaaaaaaaaaaaagggcttctgctccctcctggcacaacacccaccagctttaaagctcctcagtgaccccgagctccagctcggaattgtcccctgagctgctgcacacagggactgatgctgaggccgggctgtggaggctcatcagcaagtgttccccagtggtgcaaaaggtgagtcatcactacaggccaggaactgagcctcccgcattctcacatttccctgttcaacctcccaatgtcccagcaaggtagagcccatatttccctgctagggggatgagtgcagtgcccaaggcaaagacatcccacagagggaaagtcatcgttacgccacagagtgaccacctgcagagttgggagccagcccaaggagcataatggggaacagcatatgtgcttttctgtccttaaggaagtttaagtgtataacaggcaaccgaccacacagcagtgcctgtcagccaattccttgtctccttgtctgagtcctgggggtagggaggaagaaaggaggaggcagtgcccagaaaggggggaactgcccacagctgaccaggtagaagtttgagtaggtgctaaaggtggcagatctgagttttcagggaacacatcttgatggagaatgttgggagaaagcattagaaacgcccctgtttgagaacgcatgataaaacgaaccaaaacccacaacctcaacagattcaaccaactcttgggcatggcacacagctctccagctgctccatgctactcagaagggtgggacggtgctgtggcagcagctgcctggcatccctggtcaccatccaggaagtctccagcaatggacagtgcttgacacccgttccaatccccacccctctttagagatccagagaccaggaaccctggcagaaatcctccttccttcacttggtttccttctggctaaggtgcttgttcctcctacacatttaacttgtcaactagaatattcccataggtaaaagccctgcttataaagagctcaaaggtgtgtgtacctgagtgcacgtgtgtgcacatttatgcagtatgtgtgcatcagagcacctttgcccatgcccgtgtgcatgtgtatgtgtccacttgactatgctgtgtatgcacatatgctggacacatgcgtacatgtgtgtatgtgtgtgcattgggtgagggccagagggtggcagcagccttagtatcacctttttgggtgctctggtttcagggccaataccagtggactgtggggtaagttccaagcctggaagtagacaacttaggaggctctttactccatgcccagctctattcacagtggctgatcaggtctttactgcggatctggaaagaagctgatagaagatgggtgccagaggggcctgggtagagatgttagctgagagatacccagtatggattctgtcagttttctgggtgagcatacacattcaccaaaattcagagaatcaaattggggctttccacaagaactgtaaaactccattccctggggcaaatgtactgtttcggttaagatacttgagtgttaagttttatgcctttactgtaatgtggtcaagctgcagatgtgaaaacagtaggattgtctgtagttgtgcatctcatttctcaatagtaacattattgtggcatggaacttgaagtttgtttccttagctttcagaaaagttaaaggaacatatatagtgattttttaaaagagagcacattttacacatatgcagacacacattcatatgaatagtgcttgggagtttgctaatatggttgtttaaacctctccatgttaatttctcccacacataaaagatttattacttggacacagtggctgatgcctgtaatcccagcactttgggaggcccagtcgggcagatcacctgaggtcaagagttccagaccagcctggccaacatggtgaaaacccatctctattaaaaattaaaaaattagccaggcatggtggtgcgcacctgtaatcccagctacttggaaggctgaggcaggagaactgcttgaacccaggaggcagaggttgcagtgagccaagctcacaccactccattccagcctgggtgacagagcaagactcagtctcaaaaaaagtaataaaaaattttaaactccatttacaggataatatagccaaacctaacattttacaaataaatgattttttgctggctttttccaagtcagaattgcatacttttactccagaagaccatagggtcatctgtttcacacttgcacaaacatgcaagactaactgaaactctaagacaccagaagggtgtccagcgcatatgccgcctccaccctccctccccgtgcggtgaccctgcttctgcttctgtatcccctggtgtcccctccagtccagcagcctggagactgtcctgctcactgccatctcttcagtgacgggcccacatgggatcataataaaccccatgtgtgagcgagtgagcagctgcacttgccgtccatgccacctcagagcccttgggaaggcctcagcttccattaccaagttccttctctttgcctgtcttgaccagtgacacccacttcccccatcactacattaaaccatcctgttgactttattctttttcaccaaggaagccaaaactcttgacagagcacactgaataggcaccacgcctgtcttacaaatgggaaaatcaaagtccccccacgagttggcgtcagtagcgttcacatcccagactgatcctgacatttatttttacaaaacaaaccatctcaaaacttggtggcatcaatattcattctgtgcacagaactcttgtttggacagggcttcatccggatagctccactgggcattagcgggtgcccccaaggccggtgggagtcacagaaggctcctacgtccaggccacagctctggccggaccccctcacagcatgtgtgtggatcccacgggccagctggaagctgggcacctttcctgaccaggcgtggaacatcacttggtgtcccttccaccgcactgtgttcatgagaagccagacactgaggccagctcaaactcagggaaaggcagtgagactcacacctttgaagggaagggcaccaaggagccacattctacctgctttggccacgttgtctggcttctccagcctcagtctctttggccatgacaccataacgatgggaggggtgagttaatagacaccaaacagaactgctgtagcaactgccaaatgccttgcacagaggaggagtgtggggtgcccatgatattactctgcaagtgacattgccttctagggctttaatctcccagaaagccagagatggaatatctcagtgcttctgagcctttattttcagccctacccgcaacagcattctgcagcttgatctataatggggtgcaccacaccctctcagcctggtcagggatgggggccaaggactccctgtacctgtctcatctggagacgaaactcacctgggactaaccaaaaagaattagaagaaaaagcgaagtctcattacaaaaacacagaggattttagcccagtataactctagaagaaatggaatcctattaaggaaggaagtttggggcaaagcaccaggaaatccctcaaccggaagtgttgctagattgaggaagtgtcctaaaggaagtgggagacagctgtgggcactgtgtgcccagccccggccttcccagcagagtctgtgtgcatcgtgtcccaagtaaaaacaattcagttaccagaatggggtagttccttcacttgctaaaataaatgggtgtgtgggtgtgtgtgtgtgtgggtgtgtgtgtgtgtgtgtgtgtgtagtggctcttcatttgtttctccttcctaccactgttctcagccatttgaggagtggaaggtcgtggactggggaaagggccttccactctggctctctggttttccgtgttgttgggaacagtacgtcccaggctgtttgctttaaccagcgtgccttttatcactgcagagctacgaagtgaagagtgtcctcggaaaggaagtggggttgttaaattgttttgtccagtccgtaaccgcccacccgaccagctgcattggattggaggaaatcgagcttctgagtgcaggaggggcctctgcagaacactagcggttgccgcaggatctgtgaactttgcaatgtggctgcaagggtggtggtggtggtggtgatttggggtagttatttgttaactatggacacagtgaacgtagtttacgatcttgaaatgaaacttagatttttctggggaaatgttcagatacagttttgtgaactgtaaatcaaaatacctttttctacagtttatcttttattttctgcaaatttaggaacatatttactcgttttcacattgaatcttaagtttaagctcttcatttggtatttaggcaatatatgagaaaaaaattttttttgttcatttgtaattttaacaagttgaacattttaccatgattgaacatgtttttattacagtatttaacattcccccaaagaataccctgcaaagtgtaaacctttgtcccatactgtgatattactgttctgctacaataaatgtcaaacctaagcactttgcagttcactacttttgggaaaatgttctagggaactgtatcacaggtgaaactgttacccataaagtgtagctctctgaactggtgtgatcgtgtctctgctgaatggtggtggggatagctggctccaccacacacacctgttttaattaggctgggtaatgtgcacggagagcaaagatcacagactaaggagcagtcagtcggatatttgctttgctggcaaagatttaaaccaagaattaattatctttggacactataaagattttgttcccttccttatagcaatataatcatgacaggccatggttaactacatcagatacacgtagcagccgtgaccaagacatggtgccctaataccaagtgttcttgggttaaaggcaggcggctttttaattaaatcttaaagcactgcaattactggcaagacagctggtcttaagcagttttgtgactgcccttttcatccactacatgactattccggcctttctggagcacttttgaaaatctacttgactctgtccacaagactgaggaaagtgaaagcaaagtcccgggaaagcgggagatgattcagcccggggttctgcccctcgcccctccagcagcctctacagttagggagctcttgaactgttctcagcaggggcccccaaaaagtcaacccttccccaggtctgcgttcttcgggagaacaccttctgctggaaagctgctagcttacctgagctcagccgtgctccacctagcttaggcaagttaaataaggccaggagagagcctttaatgcgttttaaaagcgacagaccctctctcctgagtagctcgggcctgcgccccatccccccgccccccccacacacacacctggcgcccgggctccctggtgctcgctggctgcgggtccggaacgcacccttcccgagccgggtcctgcgccaccggcgggcgggcgggagtcactgcgaatataggaagcaggggcgatttcaaatgctgctttattcttacaaatactgtaaaaattaatataaaaaagtgagcatgctcagtcttttcctcttatctacaatacaaagggtttgtctgaaaagtctggttttttttctttttacaaatgtaccttagctgcatcaacaggagtaagatgtagaaaaagctaccattacaaaaataatttaagggaaaataaacacgtttagcttctctcgcagtttagtggtggtaagtccaggctgtagcttctttgcgctcctatgtcccaagaaactgcagcgggcacccggcggctctggctgcgccagggcagggcgcgctccgctccgggccgtcgggtctgaggtatgggtcgttgctgagtctctcccgccccggccgcgcgttaccggcagtctgctgtcccggcggccggcaggaagggcgggctgggcagctgcttgaagaactgccggaggccggccaggtcccgcgtgagctgctccacgcgctggtgcagcttctcgttctcagccgacagctccaccaacttctgctgcatctcctggttgcgccgcttggccttgtcgcggctcttgcgcacggcgatgttgttgcgctcgcgccgctgccggtactcggggctgccgcggtccgggcccctcttgccggcgctcttctcccgggcggggccgggcgcgggggtctgcctggggctgctgcgcggcggctccggcgacgtgggcggggtgggctgccctgcggccgccaagctcaccacggtctgtgcgcacgcggccacctgcgcgggcaacagcgagccgggcgcgtcgccgtcgccccagtcgggctcgcgcttgagcaggcggggagcggcagggcccgggcccaaggggcgcgcggggccgccgggaagaagctccaggggccccgcgccgcccgccttgtgattgctgttgaagaggtcggcgaagagctcgtcgtggcacagctccagggtgggcacggcggccatggagtcgatgtaggcgctgaagtcgatggcgctctcgtcgtcgtacatggcgggggcggcggcgcctggctcgcctagggcccctggctcggccccgcggcccggcttgcccgcccggcccggttcgtagaagggcgcaggctccgcaggccagggcgcgccgcgcgccgggccgtccaggctgaagagcgcggcgctcatggcggcgtcgggccgggctctgcgtccaagcgaggctgtcacctcgctgggcccagccccgccgccttttctagccccggctgacgtgcacgccccgccccgactccggcaccgcgggggcgccccggggccgcgggggaaggggcgggggcgccctgggagccccccggagccgccccgagccttcccggggcgcgccccctctcagttcctccccggggccccctccccggccctggggacccccagcccacgttgcaggagggtgcccgcgctgctgctccctccccggcccgggccggcctgcgctgcgctgctgggaatgacactccctctgccagcactccagggccttctcttcttcctgtttgtgggcttggaacctcctcgctcctcggggttgggagtgaaatcaaaaccaggacttggccgcagcgcgcgcgtcccaggccggctcctgtcgccggagggcggggggtggagacccgtgggagaggacccgcgcgtccaaggacgccccccgaccgtgggcacgcgcgtgaggccctcgccccgcgcctccaccgtgggaccagatgcgggaagaggcgtgggggaccagacgtggggacagcggcggcctggcaggcggggagggctgcccgcaccgcactcgggcgcctcggggaatccgggccggttctcgctgctctcctcggaggtcccgggtccggccggccctgggggtcgaggcccagagacgcggctgctgcgtcctggccgaaaggccgacgggacgctgtcgccaaaagcagagcagatgggggagacgcggtcacgacaccgcgtcctccgccggctcctcgaggtgcgggctctccggccggacgctactccccgaccccgcagacccgggcgtccgccgccagctcccgcgcccgcgtttcttccaggtctacggaagcagtgccatcgtgtggcggcatcttgcgttagacctgtttttagttccaggctctttccctgttaaatattccaaaaaagtgccttgaacctaaagtagttgggtcctttttgggaaacaggtaagatctaccagtagctatagcagggtgcagatgggcctcgactcacgatggggttacatcccggtagacccatcgcacactgaaaatgtcttaagtaagaatgggctttgtcatgtgtcctgcaatttgaggcaggcatttctggtcagacccatttattattttaaattaaaaatatggtttttttcagccgagcacagtggctcatgccggtaatcccagcattttgggaggctgaggtgggcggatcacttgaggtcaggagtttgaaaccagcctggtcaacatggtgaaaccccatttctactaaaaatacaaaaattagccaagcgtagtggcgtgcgcctgtaatcccagctactcgggaggctgaggcaggagaatcgcttgaacccgggaggcggaggttgcagtgagccgagatcgttccattgcactccagcctgggcgacagagcgagactccatctcaaaaaaaaaattgagatgggatctcacaatattgtccaggctggtttcaaactcctgggcttaagagattcgccggcctcagcctcccaaagtgctgggattacaggcgtgagccaccatgtcgggcccaaatccattaaatcactatcgctagtcacacctgctccatgtcgagtctcttcctgcgcaggcctctcaccagatctgcgtcggaacaccaagctctactaactgctgtgcagtttctgcagtcagttccagaggtcatttctaacgttgcactatgggatatttaataggtttcctaaagaacaaacatatttctttagagttactcagagggtacacaatgatgatgtcacacaattaattacctattaagactgaaatccagcaatgcatagagtgtggacttacgcacatccagaaaaagttctagcacaaattgttttgttctcatatatttcagaagccatagaaacactattaaagccctccctaatcacttagggaatgcaaaatcaatatttataagggataaccatatcctcctaaaaacaactcagagactattttcagtgagatgatttactgattccgatagtcaatatagttacattttatttttatttttatctttatttttgagacggagtcttgctctgtcgccaggcttgagtgcagtggcgcgatctcagctcactgcaacgtccgcttcccgggttcaagcgattctcctgcctcagcctccggagaagctgggattacaggcccgtgacaccacacccggctaattttttgtattttaagtagagacgggtttcaccgtgttagccaggatggtttcgttcttctgtcctcgtgatccacccgcctctgcctcccaaagctacatttattaacactaagttgagtttacatgacagtgatgcatattgaggtgctttacaggaagcggttagaaagttcttgcctaggcctggtgcagtagctcacgcttgtaatcccagcactttgagaggccgaggtgggcgggtcacctgagttcaagagttcaagaccagcctggccaacatcgtgaaaccctgtctctacaaaaatacaaaaattagccgggcatgatggcaggtgcctgtaaccccagctaacttgggaggctgaggcaggagaatcgcttgaaccctggaggcggaggttgcagtgagccgagatcacaccattgcactccagcctaggcgacagagtgaaactccgtatcaaaaaaaaaaaaaaaaaaaaaaaaaaaaaggcgggacgcggtggctcacgcctgtaatcccagcactttgggaggccgaggcgggcagatcacaaagtcaggaaatcgagaccatcctggctaacaaggtgaaaccccgtgtctactaaaaacacaaaaaattagccaggcatggtggcaggcgcctctagtcccaactactagggaggctgaggcagcagaatgacgtgaaccagggaggcggaggttgcagcgagccgagatcccgccactgcactccagcctgggcgacagagcgagactccgtctcaaaaaaaaaaaaaaaaaaagaaattcaggaggttgaaaacggttaaaatgtgtttgagttaatataagctgtttgttggggtccaaaagccaatctggctccccttcattcataggacgaagttgaccataattcagctctctctcatcctagggatcatatttggataattgaaatggcagaagagcagttctgctccaaattacagtctgaaaaaataaaacgtttttgaggagtgctctctaaacgtaaatatgaaatgaagtttcaagaggtgggaaactttttagtgctttcttcagattgttattctcagctatcagattagatggttttgtttcccttctgccttcgggctattttaaatttatggcttattttcccgagttttgggtcacaatagcgatttttttttttttttagatagagtctcgctctgttggccaggctggagtacagtggcacaatcttggctcactgcaacctccatgtccccggctcaagcaattctcctgcctcagcctcccgagtagctgggattataggtgtgtgccaccacgcccagttaatttttgtatttttagtagagacgaggtttcaccatgttggccaggctggtctccagctgctggcctcaggtaatctgcctgccttggcctcccaaagtgctgggattacaggcgtgagccaccgcacccggccatgaaatttttatatgttacatgtttatatccaaaaatactgacttttcaggatgaaccttattcgcaatgtgtgagtttggaaaaggaaagacagagtcaaaggaacaaaaccagtggttgttggggtcacgcacccctcatgctgttaaagcttgtgcatgtcattgaaacctgctgtgattggtaacaatttctatgtgcacttcagcttctggaatctaaaaggctgagtccccagattgtaaagtagccagaactgacaacaagaattggattctgtgggttgggtgtcccacctgccaaatacctgctcacattctcctcaacagaaaaggaaaagcaatttgtcttcccagcctacatttttatcaggtggattcatccctccctggcccacacccagtagcccctctgccagcctccttgcaccccaggtccccagctgcctccttgatggcagtgatgctgcagctgcacctgctcccccaggaagggtgcagcaggtctggactcacagcttgctctccctttccaatccattctccagatggccacccaagagagcccgtcccgtcactgtgttccttagaatctgctgatgttttcttggcctagaggatggagtttcagttctcaagtgggagccctccactgcccacttcaagaagtcaatttcctctcacaacaactggcacctgactcaactccaaatacccaggacctgcctggtttcctgtgtgtgaagctgatggttccaccgagagctctttctcctctgcactactctgctggcaagagcaatggtgcctgcctcgatggtgctttctgtgacttacttaatcacttcctcatctgacttctcaggaaaaatacatcccacatcttgtcaattattaagtgcactttttttatattttattgaaattgggatgcatgtgacaatcactgttgtccagagtgtcagttaggatatttgtctttgtccacatatgggtgccagtggctgggagtgaatcctgaggatgatggcggagagcactttctaaagaaatgctacatcgctcgctgtcttgatggaatgaagagcagtggtgtgtaaaaacctgcagggcaatgactctgaaatgaaaagtgattcagaggagacagtgagtgaacatgaaaacatttgggaacatcttaagcaatttacttatattgtcctttttacatgcacgtaagagtgatatattattaaaatcaatgtctaaaagaaatgaagttctttctatgagtacaaaatcaaaattttaagaaatatgagagaagcaacatcaccaaaaatggcagagtaaagaattccagtgctccatcactccacaaatacagctggcaaaagctgtcctaatcaacttttacagaactctgaaatctagccacaaacttacagcaactggggaaagtataatgaagaaagaagctgctgcaatgtactaagaaagcactttggtgttttaaactgcctgcttgccatccctccttctccagattgttggtggccatgaagatggcagcatgaactcctgatgcaggctgctagtgccagagtgaacaacacagactctgttctcaaagaaacgggagtgtgcttggaccgggctgacagctccctgatggactagagcaaggatagcgtttgcatttgggcatttgccaagagcagcaagggcaaaagtactggctgtaggagcctgagacaagcaatagaaagaccaaaaagtctaggaaggaagagcttgaggaagaacataagtggggaataagggccattaaaagctcttgcgtgtaccagggaattacgtgcatgcccagcgtgggcggagtgctcagaaaaggcctgagaagacctcaagcctccacttctggctgaccttcaagatgtgcacattcaagaagagaaagctaagacagaattataaacaacctggctaagtgttaaaggagtatgccaacacagagccagtctctaaagactggaagagtttctgtaggtactttttttttctctctctctttcttttatgggttgggggctttgggcatttaaggttactctgttaaaaatactagctgaccactaagctaatggaacacagacttcagtggcctcacacaacaaacacaatacagatgttacaaaagtagttttgaaaagtcagtaacaagtaacaacagcccacaacaaatagcaacaacaaacccttggcaggggtggagggtgggggcggaatctactttgcagagttgccacattgtaattatcaaaatgctgagtttttgacaaacatttatgaagcatgcaaagaaacaagaaagtataaaccattcacaagcatactctgaagaaattaatagaaactatccctgaggaagccagacactggacttacttagtggacaaaaactaaatcacatgtctttaaaatgctcagagttagggtaaaccatgtacaaaggactaaaggaagccaggagcatgaagtatcaccgaatagagaatatcagttaagagagagaaattaccaaaaagaaccaattagaaattctggagctgaaatgaaatgaaaaatcactaggaggttacaacaacaaacaggtttaaacaggcaccagaaataatcatcagactggatgcagtggcccacacctgtaatcccagcactttgggaggccgaggcaggcagatcatttgaggtcaggagattgagaccaggctgaccaacttggtgaaaccctgtctctaataaaaatccaaagaaaattagctggggatggtggcgcatgcctgtaatgtcagctacttgggaggccaaggcaggagaatctgttgaacctgggaggcagaggttgcagtgagccgaggtcgtgccactgcactgcagcctgggcaacagagcaagactccatcaaaagaaagaaagagaaagagagagagggagggagggaggaagggaaagaaagaaagagagagagagaaagaaggaaagaaagaaagaaaagaaagagaaaagagagagacaaagaaaaagagagggagggagggaaaggagggaaaggaaggaaaggaaagaaaaaggaaagaaagagaaagaatcagcaaacttgaatataggacaattgaaattatgcagcccgggaagcacaaaagaaaagaatgaagaaaagtgaaccaagcctaagggacctgtgggatatcatcaagtagatcaacatatgcataatgagagtcccagaaagaggagacaaagagaaagtagcagaaagactacctaaataaataataggccgggcacagtggatcatgcctgtaatcccagcactttgggaggccaaggtggacggatcacctgaggtcaggaattcaagaccatctctactaaaaatacaaaaattagccagacatggtggtgggcacctgtaatctcagctactagggaggctgaggcaggagaatcacttgaacctgggaggcgaaggttgcagtgagctgagattgtgccactgcactccagcctgggggacagtgagactccatttcaaaaaaaaaaaaagaaagaaagaatagccaaaatgtcccatattttgtgaaatacatgaattctacgcatccaagaagttcaacaacaccaagtagaacaaactcaaagagatccatactaagaaacactatagtcaaattattgaacaccaaacaaaaagagacaatctggaaagctgcaagagccaagtgactcatcacatacaagagatcctgaataaaattaataatcagtttttcatcaaaaccatggtggtcaggagacagtgggataaaaggaaaaaagtcaaccagaaatactatatccagcaaaaattgagacattaagacatttccagctaaacaaaaactgatgtatttcaccaatagacctgctctagaaatcctaaaggaagtcttccaggctgaaacaaaaggacatcaaacagtaactcaaacacatgcaaaaataaagaacaatggtaaatgtagctacataggtaaatataaaaacaccctttggtttataagttcctttttcattttactaaatagtttaaaagacaaacccctgaaacaataattgtaaagctatgttaacaggcacacaatatataaagatgcagtttgtgatactacaacataaagtgtgggaagaggggcacaacagagctgtaaaggaacagagtctttgtatgctatgaaactcagttggtatttaattaaaacttggttattataaagttaatcgttattccccagagtaaacgctaacacaaaacctaaaaatacatacggaaatggaaataagggaatcaaagtggtgtactagaagatgtcttctggtaggtgaatggataaactgtggtacacccagcttctagccgtgaaaagacacggaggaaacttaaattcatattagcgaaagaaacacatctgaaaaggctacctacatgctgtatgattccaactctgtgatatccaagaaaagggaaaactatggacacagtgaaaatatcactggttgccagaggttgagagggaaggagggagggatgagtaggtagagcatagggaatttttagggcgctgaaaccagtctgtatgatactataatagtagatacatgtcattatacatttgtttaaactcacaggatgtacaacaccaagagtgaacactaatgtaaactatggatactggttgataacagtgtgttaatgttggttcatggattgtagaaaatgcaccacgctggctcagattgttggtggtgaa

SEQ ID NO: 3304 - DNA, 1031 bp, Homo sapiens
atggctcggtgtggagaagggtttcagaacacttctgggaatccgtcattaacagctgaagagaagacgattacagaaaagcaccttgaattatgccctagacccaagcaaggtctcttcacattgtcttctctgtgcatgtctgtctttgtgtccagatttcaccttataaggatttcagtcatcttggattaaggcccaccctaatgaccttatttgaatttgattacctctttgaagaccatgtcttcaaataaagtcacattctgaggtacagaagaaaccaccacatctaaaagcaccagtgggcttacagacataacatggagctccagtggaagtgatttgtcggatgaagataagacactttctcagttacagagagatgaattacagtttatcgactgggagattgacagtgacagggcagaggctagtgactgtgatgaatttgaagatgacgagggtgctgtggaaatctcagactgtgcttcttgtgcaagtaatcagtctttgacaagtgatgagaagctgtcggagcttcccaaggtaagaatgaagtatttcaaaacttttattcactttataacatttgctaatcatagttgtcatttttttttttgttttttttttcctgtccttcctcgagaacaaccacttttgactcttaggggattcttttgttctttactcacttatctctaaataacatgcttgtgctgtacttctcaacatggataaatattgatctcacttctctttcacttcccaccctcactgcacaccgaatgttttttatcctgctattcttccagtgcagatatatcaaagtgctggaattgcacatgtcagccaccatacctgggcaaaaagatacaaatttaaatcagctgtcttccacgagtcctctcccagtggagtcacacagtatatgcttaattcttccagcaaaatgtttagacaacatgtgtgaagtgttatgtaccagggaactcattagagactcagtgcccagggtttgtattaggggc

SEQ ID NO: 3305 - protein, 142 aa, Homo sapiens
GTEETTTSKSTSGLTDITWSSSGSDLSDEDKTLSQLQRDELQFIDWEIDSDRAEASDCDEFEDDEGAVEISDCASCNQSLTSDEKLSELPKVRMKYFKTFIHFITFANHSCHFFFCFFFPVLPREQPLLTLRGFFCSLLTYL

SEQ ID NO: 3306 - DNA, 3420 bp, Homo sapiens
aaggtattcagtagaagcagatgaacagccagatgaagagatggatagagcaagacatggacattataaaggaattcaatagaagcacatgaacggccagatgaagagatggatagatcattaacagctgaagagaagacgattacagaaaagcaccttgaattatgccctagacccaagcaagaaaccaccacatctaaaagcaccagtgggcttacagacataacatggagctccagtggaagtgatttgtcggatgaagataagacactttctcagttacagagaggtagaaaatctggtgtattaactgtgaaaattttagagctgcatgaggaatgtgccatgcaagttgccatgtgtgagcagttattggggtcaccagccaccagctcctcccaaagtgtggctcccaggcctggagctggcctgaaagttctcttcaccaaggagactgcaggctacctcaggggccgtccccaggacactgtccggatcttccctccctggcaaaaactgattattccaagtggaagttgccctgttattctgaatacttacttttgtgagaaagttgttgccaaagaagattcagaaaaaacttgtgaagtgtactgtccggacataccccttccaagaagaagcatctctttggcccagatgtttgtaattaagggtctaacaaataattcacctgaaatccaggttgtgtgtagtggtgtagccactacagggacagcctggacccatgggcacaaagaagcaaaacagcgcatcccaaccagcactcccctgagggattctctcctggatgtggtggaaagccagggagctgcctcgtggccaggagctggagtccgagtggtggtgcaaagagtgtattctcttcccagcagagacagcaccaggggtcagcagggggccagctcaggacacacagacccagctggaactcgagcctgccttctggtacaagatgcctgtggaatgttcggtgaagtgcacttggagttcaccatgtcgaaggcaagacagttggaagggaagtcttgcagcctggtgggaatgaaggttctacagaaagtcaccagaggaaggacagcggggattttcagtttgattgacaccctgtggcccccagcgatacctctgaaaacacctggccgcgaccagccctgtgaagagataaaaactcatctgcctcctccagccttgtgttacatcctcacagctcatccaaatctgggacaaattgatataattgacgaagaccccatttataagctttaccagcctccagttacccgctgcttaagagacattctccagatgaatgatcttggtacccgttgcagtttctatgccacggtgatttaccaaaaaccacagctgaagagtctgctgcttctggagcaaagggagatctggctgctagtgaccgatgtcactctgcaaacgaaggaggagagagaccccaggctccccaaaaccctgctggtctatgtggcccccttgtgtgtgctgggctctgaagtcctggaggcactcgctggggctgcccctcacagcctcttcttcaaggacgctctccgtgaccagggtcggattgtttgtgctgaacgaactgtcctcttgcttcagaagccccttttgagtgtggtctctggtgcaagttcctgtgagctgcctggcccggtgatgctcgacagcctggactctgcaacacctgtcaactccatctgcagtgttcaaggcactgtggttggcgtggacgagagcactgctttctcatggcctgtgtgtgacatgtgtggcaacgggagattggaacagaggccggaagacagaggcgccttttcctgtggggactgctcccgggtggtcacatctcctgttctcaagaggcacctgcaggtcttcctggactgccgctcaagaccgcagtgcagagtgaaggtcaagctgttgcagcgcagcatttcctccctgctgaggtttgccgccggtgaagatgggagctacgaagtgaagagtgtcctcggaaaggaagtggggttgttaaattgttttgtccagtccgtaaccgcccacccgaccagctgcattggattggaggaaatcgagcttctgagtgcaggaggggcctctgcagaacactagcggttgccgcaggatctgtgaactttgcaatgtggctgcaagggtggtggtggtggtggtgatttggggtagttatttgttaactatggacacagtgaacgtagtttacgatcttgaaatgaaacttagatttttctggggaaatgttcagatacagttttgtgaactgtaaatcaaaatacctttttctacagtttatcttttattttctgcaaatttaggaacatatttactcgttttcacattgaatcttaagtttaagctcttcatttggtatttaggcaatatatgagaaaaaaattttttttgttcatttgtaattttaacaagttgaacattttaccatgattgaacatgtttttattacagtatttaacattcccccaaagaataccctgcaaagtgtaaacctttgtcccatactgtgatattactgttctgctacaataaatgtcaaacctaagcactttgcagttcactacttttgggaaaatgttctagggaactgtatcacaggtgaaactgttacccataaagtgtagctctctgaactggtgtgatcgtgtctctgctgaatggtggtggggatagctggctccaccacacacacctgttttaattaggctgggtaatgtgcacggagagcaaagatcacagactaaggagcagtcagtcggatatttgctttgctggcaaagatttaaaccaagaattaattatctttggacactataaagattttgttcccttccttatagcaatataatcatgacaggccatggttaactacatcagatacacgtagcagccgctttttaattaaatcttaaagcactgcaattactggcaagacagctggtcttaagcagttttgtgactgcccttttcatccactacatgactattccggcctttctggagcacttttgaaaatctacttgactctgtccacaagactgaggaaagtgaaagcaaagtcccgggaaagcgggagatgattcagcccggggttctgcccctcgcccctccagcagcctctacagttagggagctcttgaactgttctcagcaggggcccccaaaaagtcaacccttccccaggtctgcgttcttcgggagaacaccttctgctggaaagctgctagcttacctgagctcagccgtgctccacctagcttaggcaagttaaataaggccaggagagagcctttaatgcgttttaaaagcgacagaccctctctcctgagtagctcgggcctg

SEQ ID NO: 3307 - protein, 679 aa, Homo sapiens
MDRSLTAEEKTITEKHLELCPRPKQETTTSKSTSGLTDITWSSSGSDLSDEDKTLSQLQRGRKSGVLTVKILHEECAMQVAMCEQLLGSPATSSSQSVAPRPGAGLKVLFTKETAGYLRGRPQDTVRIFPPWQKLIIPSGSCPVILNTYFCEKVVAKEDSEKTCEVYCPDIPLPRRSISLAQMFVIKGLTNNSPEIQVVCSGVATTGTAWTHGHKEAKQRIPTSTPLRDSLLDVVESQGAASWPGAGVRVVVQRVYSLPSRDSTRGQQGASSGHTDPAGTRACLLVQDACGMFGEVHLEFTMSKARQLEGKSCSLVGMKVLQKVTRGRTAGIFSLIDTLWPPAIPLKTPGRDQPCEEIKTHLPPPALCYILTAHPNLGQIDIIDEDPIYKLYQPPVTRCLRDILQMNDLGTRCSFYATVIYQKPQLKSLLLLEQREIWLLVTDVTLQTKEERDPRLPKTLLVYVAPLCVLGSEVLEAGAAPHSLFFKDALRDQGRIVCAERTVLLLQKPLLSVVSGASSCELPGPVMLDSLDSATPVNSICSVQGTVVGVDESTAFSWPVCDMCGNGRLEQRPEDRGAFSCGDCSRVVTSPVLKRHLQVFLDCRSRPQCRVKVKLLQRSISSLLRFAAGEDGSYEVKSVLGKEVGLLNCFVQSVTAHPTSCIGLEEIELLSAGGASAEH

SEQ ID NO: 3308 - DNA, 778 bp, Homo sapiens
atggctcggtgtggagaagggtttcagaacacttctgggaatccgtcattaacagctgaagagaagacgattacagaaaagcaccttgaattatgccctagacccaagcaagaaaccaccacatctaaaagcaccagtgggcttacagacataacatggagctccagtggaagtgatttgtcggatgaagataagacactttctcagttacagagagccaagttctatagaaattttagagtattcatcagatagtgaaaaagaagatgatttggaaaatgtcctactcattgattcagaatcccctcacaaataccacgtgcagtttgcatcggatgcaagacagattatggagagactgatagatccaaggacaaaatcaacagagaccattttgcatacacctcagaaacccacagctaagtttcccaggactccagaaaattcagcaaagaagaagcttttaagaggtggactagcagaaagactaaatggactgcagaatcgagagagatctgctatttctttgtggagacatcaatgtatttcttaccaaaagacactttcaggtgagcgtctctgtgcaccagatgcaggggaacggggaggctggggcgtccctgaccgtcaggctacctcaggagcagtggatgtggtgccccacagtgcagcccacagagtggggtttcctcggtcttgtcgcaagcgtgtagccagaaatctggtcccccacctatttcttactgcttccaggaactcctctgaggctgggggcccc

SEQ ID NO: 3309 - protein, 196 aa, Homo sapiens
MKIRHFLSYREPSSIEIYSSDSEKEDDLENVLLIDSESPHKYHVQFASDARQIMERLIDPRTKSTETILHTPQKPTAKFPRTPENSAKKKLLRGGLAERLNGLQNRERSAISLWRHQCISYQKTLSGERLCAPDAGERGGWGVPDRQATSGAVDVVPHSAAHRVGFPRSCRKRVARNLVPHLFLTASRNSSEAGGP

SEQ ID NO: 3310 - DNA, 22926 bp, Mus musculus
  misc_feature (1)...(22926): n = A, C, G, or T/U
ggcatgcaggaggcacacactccctcctgagtcatcgggaaagatttaattaggttcagcctgtgctctgagtttagtatcctttcttatacatgcattatcctaacctccataaagtgaccatcacagttcttagattctttcacattggggatatgtgaagccggggaacagccagtgttcccatcagtaacctggatgcaagctaaaccggaacacccactggtctgtctggtgagctcatgcctgcacacggggagtcatgcagaagagaaagaccagcgttctgcaccgaggatctggatctattgcagcaaactgcctaaacccaggaaagggcctatagcctacgtcatctctaaatgtgtggattggtttatgttgggagggaaatctctgcgtatgatgtccactgacgtcatgctgactcctgaatgtgtgtggactgtgactgcataaaccccgagttaagtcatgtgatgtaatgtgcagactaaacctatctcagtgcttttgtaataggcaacgttaaccagcatgtggagggggctgtgaggcacacacacagtgctaggaggtgtgatctggttcagggcccatcaccaaggccttattctgtattcttctggctccttcagagtggaggagcgcagtggcagaacaggcttgactggaaaggggcagggacctttcgagggagatagggaatcgccacatcttgcctgggtggcttgataaggttgttaagactctggaaaccatgacctgtgtaaggaggaacctactgctgtgttcccttccaatgtacacactgagctcctaaccccccaagtgtgatggcatgaagagctggggacttaggtgggtagagtcctggtgcatgggacttagtgtctccaggagaaaagacgggtgagcttgctccctctctatgccatataatcgaatgcccatttgcagaccagaccttgctctgccagcactcgattctatgatcctgaacttggactttccacgctcaagagccataagaaatacatacttgttatttcggccactcagtctatggtattcttgttattacagaccaaacaaagccaagtacattttactatacagagttatatccctgcatgaacgtaacaaaacccccactttctataccatagcctaacttacttacttttcaaagattaaaatgcagaccgatgctttgaattttcccctgcagctttaggatactagggaatactagaggacaaagcttcggcatgctcatggccagggagacacgtgacagagttctcgactcatcccaagagtctcctcactcatactcaggctagggattctgggcttttcgtatgatcctaggaaaacacacagtcctaaatctccaaagatcccatgaaaggaatctctgcctctgcatagtaggggtgtttcagatggatacggggagggtagttgtgatgtttgtatatgcttggtccaaggagtggcactattagaaggtgtgaccctgttggagtaggtggccttgttggagcaggtgtgtcactgtgggtgtgggctttaatactctagtcctagttgcttggaagccagtattctactagcagccttcagacgaagatgtcaaactctcagttcctcctgcaccatgcctgcctggatgctgccatgttcccactatcatgataatggactggacctctgaacctgtaagtcagccccaattaaatgttgtcctttataagatttgcattggtcatggtgtctgttcacagcagtgaaaccctgactcagacagtagtggtgatggaatcagcttattgttttgttctatttgaatctctatcttcattccttgagacttcctgatgggccctagggtaagcacagtgtaattacagctaattttaaatcccaggatccttgtttattactattttgtgagacaggctcttggtatatagctctggcttgcctggtattcactatgcagcccatattggccttgaacttacagcatattcacctgcagggtcccaaattgctagctagagggacttgaaaaaattatttccgatccttggtttctcctcagaagatggcacttgaagtttaacaggtaagatacatagaccagtaagtgagatgccatggacgcatctgtggaaactcattgatcttacttcagctgataaagatagcgtcttgctcagccctctcccttgaaaaactatggctacagtggtaattccctcaatatggacaggttcaatacgagaggtctaatttcctataccatgctgtgtatcctgcaaggggttaggacagaaatcagagctcgaagcagcgaacagaacatgccttcaaatgcagattttgttccacattcaaaccattgaggaagtaagtactgccctggacacatgggcagccctcgcccagggaaggaggctgggacagaggggctcagtcactcccttccaaggtgtcatccccgcggctctggctaggagctcgtcctttttagccacctctcaagcctccttcctcccccgaggacctcccagctcctcctaacagctcaagaaaacagactttcatgtatacggagactgttcagcaggccttcccgattttaggcagaggagaaacactttgaaattattgtatcacacaagggttaaacaaaatgccacacactcccccaacccatttggtgcacttaggaggtctctggtgccagccctatgtcaggctagacgggaagtttatgccgccacagtagaaccaacgtgaaatctgcagacttccactccacctcctaagtgagcaagctcccctccccatccccaaatccactgcatgcaacggggaaacgcacacatgcagaacaggacatgcacacacacaaacccccaaagggcacccctctgacctgccggctcagcaggaggctgggccctattgagaatatgtgggaataggggagcctgggcattttctgacgttcagcaaagaaaaaacaggaatgcagtgtgactcgggacgctggacattagccattcatctctcaactcaccactcactgtttccattcactgcttactgactgacccaggctaagaccgaattctgacgggagactaaccagacatcatgcagcccatgggaagccagatttgtttaatggcatttttcttcattttatgtgtcatcctatgtatgcatatgtacgatgcgctagcacatgcccacggtgagtgtgtggaggtcagttttgaacttaggtcatcaaggttacgcagcaggggccttcacccattaggtcatcatgatggcctacccacaagactttaagaaaaaaaaaagctaagtttggtctggggcggggtggggtggggggagctcttaagtatcactagcagaaaacttctacaacaaaacagaaccaaacaaaaacaaccttgggggaccgaggtgagagcagggtgtgtaaagccagtctaagctccaggagaatggagctctatcaaagtccaaaccaaaccaaaccaaacccaaacaaacttgacattgaccatctgcacctccatctctcacccatggtgggcatcaccggctactccaaacagtgagatctattgtactgctaacccagtttgttgcatctctactctctggaatcactatgactgttttcaaagagcccaagaggagttaaaacccatccttactttctgtttgtgttgtggtttctcttgtgggtgcagctgtccacaaaaaaacacgggcctctgattagggccggagagctagttagttgtagttcagttccctaaaactactgcagggcagtataataggatgtatggataacacgccataccacctttgacaggaacatacttcatgggacagatccacccagtcgcaggttcagataccttgctagagcttgcgcaaagcactgatttgcctgcctgtcacttcctgatgtttagctgtggggctggggctcctggtgttctctgtccatgggttggtgaacccaaaggagttgctggagaaagctaaagaaaccacaatccattctctcttgagccatgagctaagtgctttggaaaagagcaaaaggagtagaatctcccagctccaagagatcacacctattctgtaccacatgggatgtcagatgacagagttgatttctggaggaaactaaagccacgcctgacccaaaaccctttctttataacctttgacaacacaaagacatacagaggtgtccttcttcttggctagggtatttttgtttttaggacggtctcactatggattcctggctagctttgaactctctgtgtacaccacactggcatcaaaatcgcaacagaccagccttcttctgcctcctgactgttggggttaaaggtgtgtattaatacacctacatcttccaccttgtaactccttcatgctgcccagcaggttttccgtggccaccataagaaatgactaaaaacccggtaccttgaaacattttggtggcgtgaatccaaaattagcagttctggtctcccactgagatttagcttgtctgcattcctcccaaagattccagcagagaatctgtcactcacttctatgtggtaccaggacccctgttttgtgaccacatctcaagattctctagattctcacaacctcctgctaggctattctcttgtaaggccccctgggacgtttcagagctcaccctgacaatgcaggttcctctgcctgtcctaagttctcgcattaatcacacctgcaaagactttgttctaaaacggtaagagttccagcataaggaccatctgtctgtgggatccattactagccgcaacagctggcgaggcaacaccgtctccatttagaatagaagactccaagtccatgtggaaacaagcaggtgcagctctaagcataaaagccttgatggaggaagccatgctgtggagcccagggagggaaggtgactgtgcccttgtgaggctttttgatagtttttttcacctgggctggttggtgtcaatagcctagcttggttaaggtgagatgtattgacatccaggctgatgaagatggatccagttggctggagaggtttggaccctctggaccatgacctaatgaggatgtattggaagagttggatggagttcctacgatcaatcagttcatagctgaagtagaagccgtgtgtagctagtgatgagcatgctaacaaaagggaaggccaagagtttctaaaagctggaatattgggaagtggttaaacgagcgagtgatctgcgctgacatctgtatcattccgaaggcagcgctatgatattgtagagctcagggaagagggtttgaaagaatccgttcatatattcgctctgatgacatcctcctgtgtggtggttctgaggtaggtgtactgagactccagacagcacaggatgttcggaagagaaaatgcttgctggcgggtcccccagtgagctgctgactctcacaatttcctcagttacattcaggcagctgtgcgttctcggcatggtctctcaggtctttgcttgtccgttatcattctgaaatccattgcgccttgtcctgtctctctacctctcaagagatgagaacatcaaggcaaagcaggtgggggtgaggtggaaacccagatgcaagcagtgccactggctatgggggggccagccaggagcccagactctgaccgcctggccgaggcttgaagcactgatgtcctgtaatctggctggctctctgagcgtccagtcagcctgagtttccatctctgctgtgtttggtagtgatggaaagactcacgctgtcatgtgaatacaaagaagcaaacagggagtgtaccacgtgatcccagggggttatttctgagttgtgtgctaccttgaacctttctatattctttcgtttatgcaccacaagtgacgcgccagaaaattagaaccaaccatgctgactgaagggggagaagcgaggcagtgcatgcaactggtggtgtgaacctggcttttgagggcctcaagacaaagctgcaagtcacacagagaagagtattgacccagtggcctttttctaatagcccaaactactgtttccgatcccagctcggcaccgacaaggacgcattcatcaataccagaaagcaggcagtgcggacatccttgctgcatccttgagtaaaccaaggcatgacagagggagggaatgtgagggaatgtgttgaaggccgcacatccagaatttgcctctgagctggatacccaaaagcagcgttgctcaacctgtaggctgtaaccggctgtgcattatcagttgccctgcatattggatacttatattacagttcataacagtagcaaaattacagttatgaagtagcaatgaaaatatcgtggttggggggtcaccacaacatgaggaactgtattaaagggttgcagcattagggaggttgagaaccactgccctaaagcctgctgcttggttaccacacctttcccaaggatcaacctagcttggggacagaggcatctcctcaggtcatttcttcattaccagaaggagccagggaccttccttcaaggctgactccctctgagaggaatttgttcctgatacatatcaactgggaagcgcctggccggatggctgaagaggtcacagttgtacctagtgtggaaagtggtgcctgctggtggagagagaatgggatcaactgtctcattcgctgaaagctttgctggttcaggcactgtgggcaagcggtaatgccagaatcggggactctatttccagcctagccacttatcaaacatgtaacccgaggaatgccatgtcttctcctgggatctggtttcactgtttttgagactgcctggcatagcccaggaggacctgcaacttctgatctctttgccaccacctctggagtgccgattacagtatatgaagggctggggactgagcccagcaggctaggcaagcattctaccagttaagctacgtccctaatccctttatttttgggacctgggaaacgagagggctgcagggcctcgtgctctgagtctcttagctcttcaaatgaagagcctatggaagaggaggccacctctgagcattagaaacagactcccactctgaggagaaaggatggagttttgcgtatctcttctcaggctaactctggtatttttattcccctcaaaataacctttgaaaggacatctgcaaactgcagaattggccctttgtggagagaggatgccctgcagggtaccaccactggcatttgagaagggacctgctgggagcttgcctataacagatttaaggcaggctcctgggaagagtaaatgccaagagcaagaaggccaagagcacctggctggtcaagaacaccgtacaccctgggacctcacgcctccggagccccttgccccagcagtggtgactcactagacagcttcgtctggctcatcaagtgaccttcatagcttgtcttggatgctttgtccaagaaccaaggaggaagctgacttttgaaactgtattttatctttaactgatgcataggcattgtacgtatttatgggaagcggcgtgacattcagcgcatacagatcacagtgaggcctgacatatccatgacctcagacatttatgtattgaggacattcaaaatcctctattgttactctgaaacgatggattgctgtcaaccatagctatcctgccgtgttacagagcgctaggagttattcctcatgttcaatgccacctttcctactgtgcctctgtctcctactctctccaggctcatgtgaccattgcgttcttttccttgaaattaactttttagtttccataaagatggaagcatatatgtacatgtgaggtccatcgtagccaggcactaaaagacaagggcatgaaggggtgtgtgtatgtgtctattatgtaaaatccagggttcccagggtaaagcatttaccatgtagtcgagagggctgggtttagaactctagcatctagtaaatgctggacaaacatggtctgtgtgtaatcccagaaggccgagtgaggcaggagctagctagctagtgtacaacagtgaaatcagcgagttctaggttcaactaagagaccgtgcttcgatagattaggtgcatagtgattggagaagtcatctgatatccactatcagcttctggcatccacacggacacacacatagtcacacccatctgcacacatacaccagaacactacacacacacacacacacacacacacacacacacaaatttagaactcatctcaccctccattcagacatgtccaggctcttggacagatgacagtgagatatttttgtaatgttgaggagaccaggaaggaatttgttgggataaacagaaaattcaggagtcctcaaaggcaaggcagactgggtcccatctgccccaggaacactaagcagcttccatttctcgcgtcagttccaggtgactgactgactgactggctgactggctggctggctggcaagcagccgttcattcatatgtctgtgctcagaactccaaggctgagtgtgagctcagccaggaggggagatgtgctgtattcctagaatgctgtgacagactggcacaaacatggtggctcataagtgacaggatgctttctcacacagttctgtggacaggaagcctgaaatcagcacgtctgcaggacagctcccctgtcccgtccccccatccccatcccctatccccgcccgctgctcatggatccattgcttccactcctgcctctgcctccacatggcctcctcttgtgtgtgtgtctccatgggttcaaacgttcattctcttagaaagactccatagaagtgatcaagggtgatttcatctcgcgatccttaactaattaacacccatgaaggctctacttctaaagccatgctctaaagttcatgttgagggaccaccagtccatgggagataatggttgagcaatcttgacaagggtatttgaaatgttggtacccgtgttttgcccctgaggtgttcgaagctttagagttgaaggaactgggatccaggcaatacaagaatctcgcccagaaccatcatgtagaggcactgcaggaaatgagaggaaggagggggagaatttccaggggggaagtgggacaggaaaggaggggacaagttcgccacagaaccgaagggcatctttgcatttgaaaccactatccacagatggagatggagtaagacaatgatcactggtcagccttcaagatggctcagcagtaaaccccttacctcaaggagcctcaggacctgagttcaatccccagaacccacataaaaatgccagacacgggggtgtgcctttgtacctcagagcttgcaaagctcactggccagctggccttagcctgctgggtgcaaattccaggctcatgagagactttgtctcaaacagagagtagacggttctggagaaatgacacttaagggctgccttctgatctctacataggtatgacatgaacatgtgtacctgaagagagagagagagagagagagagagagagagcgccaactacagagaaaatacacaagcactagaagaatgtgctatcttggggatcaacctgcaaaatttttcaacctgctcgtttcttgctgaaggaaccaaagctcctttcactggcaaaagcctactcagactggtccctgaaagcattgtgcgtagatgcctgctggttgccatggtgaatgatgctgatctgaagaatgaataatgtgagcgttgggggcgacagtgggattactcagtggtgagtgagaaacatcaaggagagcctggtgcggaggagggagaagagggagaagctcgtcacctgggatccggtccgctccggctcagaggggagacgtctataccagacacactgcgagcatcaggtaagaggcatggatggctgtcttggaaataaaaatggcttttcctttcacactctgcctggagaggggccaggctgtggggactggatagctaaaaatgggaagagtttaaaaacagaagacggggagaaaaaaaaaaataaatacgaagagatggatttgtccctggaagctggagatgctgtagaagcagtctcggtggaagctcttagaaacgtctgctgcagggaacccaggctataagatggccagcagcaggggggaggcaagcagaaggggaggtatgtgtacaaggacaggatgcccgatcaccccgatgggagggccttacagggcgcctgtgtattaacagggtatgaattccgcccacttacggaggttggaagtgtgtttgttgggtatgtaggtccctgggtggggaggtgggcatacatcaagagacccgagggagagtaagtccgtttccttctgaaagccatctctgggaggctctgtacacccctgcctcatcttttgtatttcccatttactgggtgcaaattcccagccacgtggagaggaggaagctgctttctcaagcatgtcactgtctttagagatggaaaccaaggactgaaaacttacttcacgctgttacgttttcccctggctcacctagcctaacaacacaagcccagaaacagaaatcagtttggcttaatattcactttgggctgaacgtgcccgcttgccatttcaatcttccgcagcatctgcacttctggctggggatggggaatggagaagaaggcagagggagaccggaacatatagagcctggcaacgcttgtctagatttttgatcaggggggattcagaaggaaagctttctctcaatcggagagaatgaaagaaaacccaaaaaccttgatgcctctcctttaccaaagctgaaaggcttacaatctgaacagggctcatctgccatacagccaaccagggtacctcatttaccaataatttaataataataataataataataataaataatcaacaataataatctattactgaactcaggggctctgcattgaaatacagtggctaagtgggtaagttctctctcttcctgtgagctgatactccaggccgctcattaataagatgggaatggagtctgttattgtgggagaagccacctggcacagcctggatccagcaactgccgatttgctgtggttctcaacccctttgggggccaaacgaccattggaaaacacaaacatttacattacaagtcatgacggtagcaaaattacagttatgaagtagcaacaaaagcaattttatggttggagggtcaccatcacatgaagtactgtattaaagggttacagcattaggaaagttgggaactagtgggttagacagtcacaaaagtcatagtactattgctacttttagaagttatggggcaattagaagttaagctatcctgggagctgaggaccttgatctgagaaactaatttcttgcaccttgggctttgacaaaacaaaacacttgcagaagctttgaggtagatcgccactggggggcgccagagggaatctctactagtcatgggaaaagtaacttgtcaaaaaaaaaaaaaaaagccattgggcagaatgttctaggtaacattacagcattcacagcagaggcaagaggtcaggactgagctgagaagcataaggtaggccctcagagctctcttcacgttgcctgtgtttggaagggctgggaacgacactgtcagtgatggatctcagccaggatgggctgtggccgggatgatgtgggtacatcttgagcctgagggctgctagctttgtcatgagccagtcctcattcctacctgtattccaccactggcttactagcttaacctccggacgtccattttcttttgtctctctaacgatgtcagtatctgtggccatctcatgcgctcagtctgcagcggctaggatgatgtcaaatgctgatgtaggagggaggatgtcactcttcactgtgatttggttccagacccgggatgaacattgaggttgggaacgtgtctcacacaggagccatcatctcctggtcaccctcggagccctgcttggaggactattaccatattatgtacaggcccaactggaacagtatcttctccggatacctgcgctataacttccatcacgaggagaaggtgcctcgaaccatcacctctgtggcattggaacacctcgctccttccactctctacttcctctgtatcagctgcaagaaggctgccttcccgtatagtcactactgtaccatgttccacaccctggataagagtccgctggctgccgggggctccctggtggacccccagatttctctttgggtgctgatggccatcctgctggcctgcttcactgctgtgctggccttcatctgcctccagttctggtgcctccgctgtcacgaacctcggtggtcttacagagccggccaaatggaggaagccaatgggttggtaagatggcccgaggagaccccagctcttggtcagagggaagaagacctgcaggggttccccctggaggaactgccacgaaagaactcaggggccagggccaaagctgaaccagaggctgaagccatccaggatgccttagaggtggtggccttagctagagagattggtaaccaaccggccatactgcctcactatagggagtgagcaacagtaaggagatgccccgttttccaaagcttaaattgctctccatagttggtcctatttgtgaaaatttgtctatagacctcccacttctgtcctctcacatgtcagtgctgtatagatgtcacatgacaacggtccccaagttggacaacacagaccctcaaggtacatcaggggcaaacaaggcattgtttcagtattgtctatttggaggcctagcaaagaacggaagactctgtttcagtattaaaatcaaccatggctatgtgatggacagtgaaagtagctagacctgaatctggcacagtacttggaagaaatgagactagcattaacatcaatacaaatgtctttcttttatgtaagctaaggtttgaaagagaactgggaagggaaaccagatttttagtttgtgacccatgtctctaagcctcttgaaatgacgtctgcaagacatctccactcctccctccctccctcccctccttcctttgttttcttctgtgtatggggatacagtctcccataacagtcttggctaactggaacttgccacgtagaccagactgtccttgaactcagagcagtcctgctgcctcagaccctcagtgctaggacaggcgagtgctaccacccctggatgatgagcctctctaggtttgagaaattaccttaaacagtttgacttctctggagaagacacccatcctctctagcatcctcctcctacacagtaggtgccccagccagagcctctctggggttcaccacacttctaaagctctcactccaccatagtcatctcggcttatctctgctgagtttaaaaatgggatcaaaggtggctgggttttgttccattagcaagaaaatcactggtgtctctcgccccccccccccatccccagtgggagacatgtttctttattccttctacatgagcccctattgtaagggttaaattgtacatattgtgaccttggtgggacttgttggaaactattccctccacaactgtggaaatgagggtgtgggtgggtgtacgtcatgtctccattcccgatggacaccgagcatggacaacctaacccatgtctggcctacaaggggtatataagaaatgccattgagtgaatgggcagaaggaccgaggaattagaatggacccagtggcgacaatcacttggaatgaagatgtgcacatgtgaggaaacaaaataagtcacatgaggtagaggagaccttcctctcagaaatagttctagacacctacaatggcctttaagctctgtctgtaaagctctggaacttacagagcccagaatcccagaatcacctgatgatgttatgataaatcaaccaagaaatagaagaaactgggaggccacaaggagactccccatgtccccagttacccacccacctcagcacattactcacccctcacctcagctcctgcccagctccctctgtccagaatgttctaccccatccctgctagctgtgaactaataaagttgaatggacttgcagtggtttctgcctggctctcagtgttcctcttgaataagataccccgtggctttcctgattctgggaacacctttccctttgtcttttcccactctgtctgtcacgggtgagatgggacagggctgtttaccttggatccatagaggtaataaggctggacattggcgggcttatcccgttgtggttcttgggtgaaagggatggcagttcggacaaaactagaagaaaagagacagggaagcagttaacagagccctgtgacatcctccaagggacagacaactgcaggagccccccacaccgacacctgcagcaggtcctagatggctgtctacagaggagccagactcttctgataccccctcccctttgattactgcatgctttcccagtcttctcaaaaatggggaaacttggggcccaggagacacaagagtcagggtgtgctgggtctgaagatgtccttctctggggctccatttgtcacctccagtttagtttagaagctgagttagtaaactcctcctgtaaagggccaggtaaaaaatccctcagctttgcaagccagacatctctgtcataaggacttagctctgcccttggatatgaaaatgtcatagatgacagcaccctcgagaacatggctgacttccattagaattgtgaattttaaatcatcttcacatcatgactattgccctttgagttttcctctgaccacccactgaagatgggaatgcggggctgggaaggccatgggttgccatggaagcaggaggaccacagttgggatctcacgtaacagtgctcagtggctgcagctgctcccctataattccagcttcagaaggtggaagatagacttagagacagagaaatctggctcgtcaacctagccgaacaggcaagctctagggttgattgagaaagtctgtctcaatgaaaggggaagagctctgaggatggttccagtcatcaacttggggcttccatgtgggtgtccacatgcacatgcatgcacacccacatacttgtatgcccatacatattcaaacatacatacatgcatacaacacacacacacaaacggggaacacaggatccccctcaaagagatggcaccattcccagtgcatgggctgctcatagccagtcttaggtcatgtactggtgtcatggctgccaacaagataggatgtatagttgtggccaggcaatagtttgtagccatgactcaaaatgtactataaagtcagatctttatgaagctgagcatatcttgttcaatgtacagattcaggtacatctgtgtgtagactcttcccatatctttccattcgtcccgcatggatttagttcacaccaccctgacccaggttcctggaacgcagtgacttcacttgcacacatcttcacccaaccatccaactgttctcgcttggtttgtgaatacaagtgataaggccctgtgtgaggaaaggattaggtcttatctatacctcagagcctgccctggagctgggtgttccttccgggaggcaagttctactctgcaaaggggcctgttgtgtacacacatggtcaggtatgtatccatgtccttacacatggacagtgtgatcagaacactgtccttcatcaaactctcccaggcctcgtgcacacatggttaccatagcatggcctagggagcctatggtctgtccccactttatcttcacagctgctgtgagggtccctgcatgcattacagccaacagggaacaatcccggtcaggtgggaataaaatacaggctcagctcagctcagttggctggccctggatcagtacctcgggactctgacaccacatttaaacacagtaagactttggggaaaagtttccttgtgacagtgatcacggcaaagctttaggcatggctacatcaaaactcttttgtaaaggacagctctttagcaaagcacctgtgaccttccctacaagaatgggttctactgacagaggaatagcactcaggataatagcctaggaaggaagggcttgtactatgtatagcagcgaactcttttgcaaaggacatggggccttttcatgaggatgggttgtactgactgaggaacaatnnnnnnnnnnnnnnnnnnnnnnnnnnnnnnnnnnnnnnnnnnnnnnnnnnnnnnnnnnnnnnnnnnnnnnnnnnnnnnnnnnnnnnnnnnnnnnnnnnnnnnnnnnnnnnnnnnnnnnnnnnnnnnnnnnnnnnnnnnnnnnnnnnnnnnnnnnnnnnnnnnnnnnnnnnnnnnnnnnnnnnnnnnnnnnnnnnnnnnnnnnnnnnnnnnacaaacatttctagatgggggtcaagttgggttagaaggctccaagcggctggatggtttgtgttgttcaccatggcattgctacctctagcacagagcctacacccaggagcagctccagataagcacttgtctggagcaaacagaaccactaggcccattttggaggcaaatgaccacagcctctttcctgccctgctcagtaccctgtgtacggggattcccttaccggtttgtggatccattatagcagtagttggggagaaagtcaaagttcagctcccagaagacatgcagggtgatgcggccgtaaggggcagacacgttatgattggcttctcggaacatggcatctgaagctgtctagcgtcatgtgcttacagaggagtcggtgtgtgagtcggttaatctccagcagccactccagctcctgacagagagagagaacccacagctgctaaagagtttcaggtaacatacacacacacacacacacacacacacacacacacacacacacacacacacagacacacacagacacacacacacacacacacacacacacacagacacacacagacacacacacacacacacacacacacagacacacacacacacacacacacacacacacagacacacacagacaaatacatacagacatacacactgaacacttagaggagacccctctgaggcaagctttggcctcctatatgaggactaggacccccttcagttgcatgggacaattttcctttcttctgatactcttgggtagcacttgtggttgggttcacttcttgatgctctatagcttgtcaatcattattagcccaaagaatcactgttgaaataggaaggaaaaaaaaaaaaagcccaacacacaagagagggtggagaagctacatgcagccatgaaagagaccgctgagtgtgggcaagccccatctgcagccctttgggtagaaagcatgtttgtatctttctgatttctttttttttttaattaaaaaaattgtatttacttagaagcattcagaatgtcaacaaaacagccgcaatttttttttttttgcaattacagagtggtattcagttaacagaacaacaattatcttcgtataagctgcatcagagacaactgaagatgaaaaaaataaaacccaaaaataaaaccaaaagaaaaaaaaaaacaaactactgtccccatatataactaatttgtgctgtgcaccaacaagaacctgctttaaatttccatgccaatttacagcccccagactgtaccaggcaaggttagtggctattgaaaataccaccaggacagggctatctaaagacacattcggtagtgtgttaactatacaaaaaaagacactgtacagtttaaaaacaaatcttacacagccttacatttcaatttttttctttaaaaggagtgagttgtgtacaggggggttaaatgctttatagacaagaaaaaaaaaactgtgctagaaccaacttattcatcatcatcttcttcttcatcttcctcttcttcctcatcttcttcctcatcttccttttccttctttttcttgctcttttcagccttgaccaccccctctttcgctgcatcaggttttcctttagccctgtaggcagcaatatccttctcgtacttctccttcagcttggcagctttcttctcatagggctgcttgtcatcccctgcagtgttgttccacagctctcctagtttctttgcaacatcaccaacgcataagccaggatgctcgcctttgattttggggtggtactcagaacagaacaagaagaaggccgaaggaggcctcttgggtgcattggggtccttgaacttctttttggtctcctcttgggggggggggatgtaggttttcatttccctttcataacgagccttgtcagcctttgccatatcttcacatttccccttttctttagcagacatggtcttccacctctctgagcacttcttggagaactctgagaagttgacagaagcatccgggtgcttcttcttgtgctcctcccggcaagtttgcacaaagaatgcatatgaggacattttgcctcttggcttcttaggatctcctttgcccatgtttagttgattttcctccgagaggcacagagtcgcccagtgcctgtccggctcgcgcttgccctggcgctgtctctatggagctcaatgtactgcaatggctgtctttttctgatttcttaattggtaagggaaaagcctgtcctagtgtgagtgtcctaagtaatactgtgactgcatctcggtagaggtcatttctctgtcttacagaaagtgtcatataggagataccgcctacttagggttaactagtcagctgaagtaggatatttccagattttggcaacattgtcactgagacccctatagtctgcactccaccccagtgaccaggaacctgtgtgtggcagaggctctgatcattgaggcaggggtgagctcagggtgtgggtcggcacagagtggggtgctgtgtttgctgggaaataaagtgataatgacacccttctaattgggttcccttcatgctgctctgcaacctctcaatcattattatccaaaaagaatcacaatctacgtaggaggggaaaaagctcaagtcctggggcatcgaaggccactctggccatgctttggtgaggccagtttttacaccgtggtgccgctcttcctgttaccgaggggagacgatcagaaggccatgtgcccaaggtcacacaagaacaagtgcttgggatggcattcaaaaccacactggcatggtcgggaccagctttcccagggagctcagtgggtcactacccacaaagatttggctcctgtctcatcagccacgggcccctcctcccccacctgacaagtctactttggtggggtcaaggactcagctcatacttccaacactgcagcttggatactctgaaactcatcctgcatagctgtaagctgggagtgcaggttgcaattgcaaatgctaacagcaacggggccaggcaggccccagatggaaaactagatggcttggaaaggggagtcttaggggatgggtggcgggtgggggactctatcattagcacagcactgggcctggtgctttgacacttatcccaactgttgccatgctacggtgggctaaggatggcagatcctagatgttcctaaagaatgctaaaacctgggtttcaaccacagagtggcagtcagtctctgcaccaaagaagtgaacgaaggatagagatagagagctctctgcttctgtctctcggggctgagctggttctgctgcagctccgttcccatctgctgaggacgggcaatatggtaaacgaacactgatggcaacgctaacgagctcatttctaagatcattgagcccttttagcacgctgcacgcggtaccctgttttggggaagacaacgagagccggggaaagaggtctgtgattctatgatttcaagttccatgaacgtgggttagttgatgcaagggtggacaaaaggagctggtactcaactctgctgatgtgggaactggggcacaaaagcaaaatgggaaaataagacagccaggtaggcaatttcaaagaaccagtctccaaagagcgggaaggaggagaaggagaggccagccccaccagagcgaccacagttctgagagctcagagagactccagcgggcatctgagaattaaatacagcaggggccagtgggctgccagtcaggtgggcttgtgggggctctgcggatgactaggggagctggacctgttgacctgagtctgtagtccgcccagcaattgctgccatctgggagtgctagtctggtgctgtcccagctcctgcagtctttcttgaatgcttccaaagattccaagttgactcaagatttcgagtacaccagaagccaaacagcccatgggctgccagtctgcaggactccctgcttggcacacttgcacgacgaggtgactggctccccaagtcacacgcggtgactcacacattttagagcagtcttgaaggtggatgggaaaggcacattcctcagttcgtttctgccactgccaggaggcagaggctgccccgcctaggccacaggaaccaagcctgcccacaggagagcatctccccagggggtcctccctaggctccccggggagaagatgttctgggtgggggtcagtgtctcagctgattaaacaagggctcacacttcgagttttcattgtgttctagccaagagaacactcagtgtcttccagggagtggggagaggtcgtggatacctgcccccccccctccagatatgctcattagtgggaagccagaatacacagataaacaaaagagaagaaactcaaactcccaccccttgagagataagcaccgaggacattttaatgcgtacaaaactctatttcccaagctaaaggcaggcgagtgatttcaggaatgtgagctattttacagtttcttgtaagtgatgcaagactcaggtgagtggttggttcacgtcctgcttacagatgctgcagatattcccgtatcccaggagaacactgcagccctctagtcctttctcgctcccttcttctcttgaaaaagtaagctatcacttattaagcatttatcaactacaaagacccattccaaattctttccagatgagttcttactatgtccttctaatgactctctgaagtggactctaaggtgtccttcactttagaggtaggaaacaggcttggtgaagatatataacttgcccaagatgacagagctagtcacggtcagagctagggacagactgggaggatgagtctgtaggactctggtgtcctagttcaatgcacttgatgcctgccacctcttagaaagaagactgagagggagcaagtccagctgctgttttctggaaggtgcaggtttactcctgaccgggcaacagagctggctgaaaactctaaggggcatagtacaaaatgaagacacggggcagtgctcaaaaccatccagcctttcaagatagagaccaagcagaacaaacaacccactgtagaacccttctgggctctcacctcccacatgcccttcaagtgaccttgtaatgcttcctctagcctcttaggactctgcctgcttgacccacctggtatatcctaaggacacggcccaacctgggggatgggtacctccgatcttctggagactctcctccactctgcttacctggctgccggtccataaggaacggtaaaattattcccattccattaatgacctttcatcccagtctctctggtcagatgtaaaggaaaccccttgctactcttaaactaggccagaagagctaacaactatttccaactgggcatccatctgaggcatccaagagcagagcctacaagggtctccgtttcttaccacaatggaggtcaggtcttcactctcaaagcggctgatggcctggtccaaggacttgtacatggcagcagagatccgctgggtgatgagtctgttcaagtcaattgatctccccaacagctgaagggcagaggtgggagaaagttacgtaatatctacacagatatctgacaactaaatacgatgcactggtagcaaactgaactaaaattatagaaagcattattgtggcaagggaatgcctgtatgtagaatatagatagcatcacataatctcttggcaatggtaattctatttaatcttttatctttggcatattatatgcatatatggtgtatgtgtaatgggcatgcatgcttgtgggacaaagagaaaaatgccctcagtacaatgaaatgctcatcaccatgagtctggctagcctggagagagttttgcactatactactcgaaggtgttacatgcatggctctcaacctgtgggtcgcaacccccttgcggttatatctcaggtatttacattatgattcatactagtagcaaaaatgcagttataaaataggatcaaataattttatggtgggggggtcatgacaacatgagggacttactaaagggtcacagcattaggaaagttgagaaccactgatttagataaaacccgctgaggtcaaatacaactcattcaggctgtgggcagaggcttggggcaagctctgacctctgatgaacgcttctgttgac

SEQ ID NO: 3311 - DNA, 864 bp, Mus musculus
cacctgggatccggtccgctccggctcagaggggagacgtctataccagacacactgcgagcatcagatgaacattgaggttgggaacgtgtctcacacaggagccatcatctcctggtcaccctcggagccctgcttggaggactattaccatattatgtacaggcccaactggaacagtatcttctccggatacctgcgctataacttccatcacgaggagaaggtgcctcgaaccatcacctctgtggcattggaacacctcgctccttccactctctacttcctctgtatcagctgcaagaaggctgccttcccgtatagtcactactgtaccatgttccacaccctggataagagtccgctggctgccgggggctccctggtggacccccagatttctctttgggtgctgatggccatcctgctggcctgcttcactgctgtgctggccttcatctgcctccagttctggtgcctccgctgtcacgaacctcggtggtcttacagagccggccaaatggaggaagccaatgggttggtaagatggcccgaggagaccccagctcttggtcagagggaagaagacctgcaggggttccccctggaggaactgccacgaaagaactcaggggccagggccaaagctgaaccagaggctgaagccatccaggatgccttagaggtggtggccttagctagagagattggtaaccaaccggccatactgcctcactatagggagtgagcaacagtaaggagatgccccgttttccaaagcttaaattgctctccatagttggtcctatttgtgaaaatttgtctatagacctcccacttctgtcctctcacatgtcagtgctg

SEQ ID NO: 3312 - protein, 244 aa, Mus musculus
TWDPVRSGSEGRRLYQTHCEHQMNIEVGNVSHTGAIISWSPSEPCLEDYYHIMYRPNWNSIFSGYLRYNFHHEEKVPRTITSVEHLAPSTLYFLCISCKKAAFPYSHYCTMFHTLDKSPLAAGGSLVDPQISLWVLMAILLACFTAVLAFICLQFWCLRCHEPRWSYRAGQMEEANGLVRWPEETPALGQREEDLQGFPLEELPRKNSGARAKAEPEAEAIQDALEVVAREIGNQPAILPHYRE

SEQ ID NO: 3313 - DNA, 22867 bp, Homo sapiens
aattctaggtctgtaaatgcactagttagatgctcttgggcaaattacctaaaccctctaagccttaatttcccctaagtagagatgataataccaaatccaatagggttgtttgaggtttaaatgtgatcacatatataaagcagtcagcatggtgcctggcacactggaaacgctcactgaaaaaatagccattaatattattttgtttgatgacttggtaaataaagacaaaaacacagctttctggtcgaatttcccccagcagctttggcgacagctacgattctctgattgtaaacaggggagtgcatatgtggggggtaattttatgcaacacagcatgtaccccacaaagtgataggacagaggtgagagccaggactagttgatagaatgcaccaaaaaatgcattttattcaacattaagaacatcataaaaatgggagatgttcagtaacagattgtactgggtggagttcctcctcactgcaggtatcttataacaacagggttgttataaggggtcccatcaagggctggaagtggggatagacgtgctccctctagaggatcaagctgaaacgcattcttcctggacgctcatccttctgagtggtgtcctaaaccctcaccgccacccaaggagcttctagtaccaagcttccctgaacacttcctggcaagcacaaataaatacacatttacatatatggaaactgttcagcaggaattcccagatctaggcagaggcggagaatagtattggaactgttttaccacgtaaggatttttaaaatgccccctacacacccactcggttcactttggaggcccctgattgacattcctatgtcagtcttggattctggtctagactgggagtttaggcttcagttgatggtccaagatgcatttcatgtgagaaggaccagcatgaaatgaggagaattcaaatcctcctcctaagattaaaaaaaatcccccccggcccctcattcccccaaatataccccacgcatgcaagaagaaatgcacacgcatgctgaaaagtacacacacactcatccccgaagggcacccatctgacctgctggctcaataggaggctgggccctattgagaaaatgtgggaataggggagcctgggcattttctgagggttggcaaagaaaaacaagaatgcaacatgacatgagccattggaaacttgccattgaaccaattctgctaactgataggttccaatcaatgggcctcataggaaactaattatgtatcctgcctggttaggatggctcacttaaaattaagcttatttaaatccacactacacaaaatagatagctttatgagatctcaagaaataaacaaccctgattcaggaattagagccatgttattactgtgtgacgcagacctgcattttcttaaaaaaagcaaaaaagcatttttaaggagagaaaaaaatatggtgagtttaatctggcagatcctgggcactgtaatattatctgtagatgaactttaaaatgttgtggcaaaatatacaaataaaattcaccattttagccatgtttaaatgttgtatacagacttttcatctatccgttgagataggcctctatctcatcagatggtaaacacggccagccacttcaaacagtaaggcctatttacttggtaaactgaatttgtaagcaatttgcatctctgctctctggaatcacaattgctgttttcagagatcccaagaggaattaaactgttcctaatttcctatttttgttacaatttctctaatggatatcatcagcccgcaaacacaaacacagctctctaatttaggtggaatggctgcagctcaattccctaaaatcactgcaggtaaataaaggcgacggcaaaaataaaacagcagcatcgtccttgtcgggaagatcacagagcaagacagtgccaaggactgatcaattctcagttccaggatcaaatccattgtaaacgcttgggtaaaactactaatgtgtctatgtgtctgtctgtctgttcttgacatttggggggccatagggctgggtctccaacatctgggttccttcttggccttctcagctcagaggctgaaagatccaaagagctgctatgcagatctcaagaaatgacgctcctttctctcctgggctatgaataaggtgcgttggaaaaggcaagcaggggaacaggagccgagccttccagctgagagatcacatcaacactgtcacactcagagatgctaaaacttttgaagggaaccaatgtcatcacttttcttgataatcagtactcatgtgatgacacacaagtatatcaagcttctctgtgaatttttcacatacgaattccgtcacagccgcccacattgttttctgtggctgctctaacaattaccacaaatttggtggcttcgaacaacagcaatgtattctctcaggcttctggaagccagaaatccaaactggtatcactaggccaaaatcaaggtgtcggcagggccacattccctccagaaactgcaggggacgatctgtttcccgtctcttcagctactggaggctggcggcaatcccgggcttgcagctgcaccactccaatcttcccatctctctgctgggtcttcgtatggccttctcctcttacatgtgtaagctccctctgcttctcccttatgacacttacgatagcatgtaggacccagcataacccaagataatccaggattatcttcccatctcaaggtcctccagttaatcacatctccaaagacctctttccaaagaaagttacattgacaggttccaggattaggacctgatgtctttgggaaacattctcagccttctaaaccaggtaaggcagtgcaagtatccccatttagcagaagtggaatctgaatcccaagtgtaatgaagtgacttgtctggggtgagatacaagatgaaattctgcataggaaattccatatgtattggttgccaaaatcacaaaagccttctggactggtgggtaaactaccttgtagaagtggtaccatgcagacagaagggtggggtggtggcagggaagtgggaggtgctgttggtggtggtgtcacagggaccaagattcccctggtcagcccaggcgggcagtgttggcatccaggtgtgtacccagctgagctgtgcccagcttgctgcagcaaagcactgggttctgggtcctaaggatatgatttaacaagggaggcactgtggtagtatgacggtatgatgcatttgcctgaggtcaaactgtgcctcagatgggggcttgtgacaaccaggccaaacagatcacaccaacaatttctaagggccaaaaaattaccaggaagttattggaataattgaatgaatgctttatgccgcaatctatgtcacttggaaggcagttttaggatagactctatataatttactttatttagagaatatattcttaaagttttgattcatatattaattttgattacttgaccagttgttaaagttttgttttattgagcatcatctctaagtgacagagctcttgcacagaagaacttagactccagagtagggcctgttcagaagaggaaacacttgctggtcatatttctccaaatgagttgatgtcttccctgacgctaccacatcaggtggttagatgttctctgtaagagcttttagttcttcacctgctccagcattctggagtccaccatactatgaagtcctggccctacctctcaagggaagctaatcacaaagcaaagggctactatggactgaagaatcacaggttacaggatggtacaagcagagcagcagagcatcaaagaggccagccaggatctccagctctagtggccaacaggcccaggcttacaccattgtttgccaggaccttgctttgtgagagcagccaagccggccccgctgagcttcagtctctcccgttgtacaatggtgataagaaggccgatctcaaggagttgtcatgtggtttgtaaaacgagaacacacatgttaaatgcagaaaaagttcccaagtttctgagttgtatgagttttactgtcatctttgaacttttcaatattatttatgtacaatgagcatatacattaaaaaataaaaccaataaaagtgatttaagagaggaaaagcaaggaagtgctatgcaattcagggtgtaaactttgctcattatagcctctggatgaagctatgaccaactcaggaaatggctctgaaccactgaccttttcttcttaataataacagctactattcgtaagcccaggactttacagacatgggttcatctgttacaaataacactacaagacaggcattataatattctcatttttaaagtgggggaatttcccccgagaactggaacaagacaagggtgcccactttaaccacttctattcaacatagtactggaagtcctagccagagcagtaagacaagagaaagaaataaagggcatccaagtgagtaaagtggaaatcaaactgtcactgtttgctgatgatatgactgtatacctagaaaaccctaaaggctcatgctatacaccaacaccgaccaagctgagaatcaaatcaagaactcaacccctttcacaatagctgcaaaaaaattaaaatagttaggaatatatctaaccaaggaggtgaaagacctctacaaggaaaactacaaaatactgttgaaagaaatcatagatgacacaaacaaatggaaacacatcccatgctcatggatgggtagaatcaatattgtggaaatgacaacactgccaaaagcaatccacaaattcaatgcaattcccaccatcaaagtaccatcatcattcttcacagaactagaatagacaatgctaaaatgaatatgaaactgaaaaagagcccacacagccaaagcaaggctaagcaaaaagagcaaatctggaggcatcacattacccgacttcaaactatactatcaggctatagtcacgaaacagcatggtaatgtcattaaaatggcatatagaccaatggaacagaatagagaacccagaaataaagccaaatacttacatccaactgatctttgacaaagcaaacaaaaatataaagcggggaaaggacagacacccttttcaacaaatggtgctgggataattggcaagccacatgtagaagaatgaaactggatcctcatctctcaccttatacaaaattcaactcaagatggatcaaagacttaaatctaagacctgaaaccataaaaattttataagataacatctgaaaaacccttctagacattggcttaggcaaagacttcatgaccaagagcccaaaagcaaatgcaacaaaaacaaagataaataaatgggacttaaactaaaaaacttctgcatagcaaaagaaataatcagcagagtaaacagacaacccacagagtgggagaaaatctttgcaaactatacatctgacaaaggactaatacccaaaatctacaaggaattcaaacaaatcagtaagaaaaacaaacaaacaaacaaacaatcccatcaaaaagtgggctaaggacatgaacagacaattctcaaaagaagatatacaaatggccaacaaacataaaagaaaaagctcaacatcgctaatgatcagggaaatgcaaatcaaaaccacaatgtgatatcaccttactcctgcaagaatgaccataatcgaaaatcaaaaaataatagatgttggcgtggatgtggtgaaaagggaacacttttacgctgctggtgggaatgtaaaccagtacaaatataatggaaaagagtgtggaaattcctttaagaactaaaagtgagaactaccatttgatccagcaatcccactactgggtatctacccagaggaaaggaaatcattcgaaaaggatattgcacacgcatgtttatagcagcacaattcgcaattgcaaaaatatggaaccagcccaatgcccactaatcaatgagtggataaagaaaatgtggcatgtatacatcatggaatactactcagccataaaaagcaatgaaataacggcatttgcagcaacctggatggagttggagaccattattctaagtcaagtaactcgggaatggaaaaccaaacatgattatgttctcacttgagtgggagctaagctatgaggacagaaaggcattaagaatgatacaatgaattttggagactcagaagggtgggaggagggagagggataaaagactacacattgggcatagcgtatactgctcgtatgatgggtgcaccaaaatctcagaaatcaccactaaagaattaatctacgtaaccaaaaaccacctgttcccccaaaatttattgaaataaaaaaaactgaaataagtaaataaataaataaatacataaagtgagggaatttggccaggtgcggtggctaatgcctgtagtcccagtactttgggaggccaaggtgggtggattgcttgagcccaggagttcgagaccagtctgggcaacacggtgtggggaggatgcttttttttttttttttgagatgaagtcttccactgtcgcccaggctggagtgcagtggtgcgatcttggttcactgcaatggcagggtgcttttatgctctgtggggactcaccactagctcttgggaagaggcatgctgtatgcattgctgcagatttaagacaggcccctgggaagactgaatgccatgggaaagccgcagagcaactatctgatctcatatctactaaaaatacaaaaattagccaggtgaggcggggggcagtggctcacgcctgtaatcccagcactttgggaggctgaggtgggtggatcacctgaggtcagaagttcaagaccagcctggccaacatggtgaaactccgtctctactaaaaatacaaaaattagctgggcatggtggtgcacacctgtagtcccaggtactcgggaggctgaggcaggagaatcactggaacccgggaggcagaggttgcagtgagccgcaattttgccactgcattccagcctgggcaacagagtgagactccagctcaaaaataataataattagccaggggtggtagtgcacacctgtagtcctagctacttgagggggctgaggcaggaggatctcctgagccttgggaggtcaaggctgcagtgagccatgactgtgccactgcactccagcctgggaattccagggcgtgctctgtgagccactcactttccccatgtgccaatccagctttgggactggggcttgccccatattatcccttcactgccaccttcaggaagggtggaagaaccttgctcctagctgatttcctctagcagtaatttactactgatgtcaactagctggggctcacctggcctgagagcgaagaggctacaacttgcacagactctggaggaattgtccctgatgatggagaaagtgtgagcctggctggggtgtaatgtcctggggcaggtgtcccagatactttatctccttcacaaacggctgcactggctcctctgggtgctgctggtgagcggcgacagctcagaggagcgggatgaaccctggcctccgcctccgagtctggggccccaccccatttcactggcagctctgccactcatcagtcaagcggtctgaggaatgccatgtcttctcccaggactgtgaaacaagagggcttggaggcctcacattctctgagtatcttaattccacagtggaaaatttctcttggttaaaaatgtcatccaagaatattaaaaataaattccaattttctgtggaaaaaggcttgagttctaccttgttcctcctcagaccccttaactctggtatttttactccccgcaaaataaccttttcaaagggcatctgcaaacagctgcgtggcctttctgtggggaggatgcttttatgctccgtggggactcaccattagcacttgacctggctgtgctcgcatgggaagagacatgctgcatgcattgctgcagatttaagacaggcgcctgggaagactgaatgccatgggcaagctgcagagcaactttctgatcaaggaacactggcttgttcccgagttcccaagactccaagcctcccggagacctttggccaagggtagggtcacaactcaccaaggcggctcttttttttttttttttccaagggaaaaagtctttctataatacccaggctggtctggaactcttaagctcaagtgatcctcccacctcagcctcccaagtggctgggactacaggtgcacaccactgcagctgtgcctggctttcttcctaaccttttatcattaatgtgaatcagaaagagaccttcatgggttaacttggatactttggccaagaaccaagaagagaaaagctgacttttaaaaacatataatgtgtataaatttattcaggtctacatctatctgagctactttccaccctctattccagacacaccctgtgatctcaatagaatggtggcaatgggttcttacaaggttgaaaggaacaggaagggatggaacctcaaagccagacggccctttatgagaaaaggggaggcaagcagtctggattcttgaaaggaaaggaacgctggggatgattcaatccaggagtagcaaacagtttccatttctggcgtcaactccaactgattgattgggaagcagtttcttgggacgcttgtgttcagaggaactctggggctgtttctgcacccagctggaagcagtgctgcattagattcctagggttgctatcacaaattaccataaatgtggcagcttaacatgacagaaatttattctctcacagttctggagaccagaagcctgaaatcaaggctctcgcagaaccatgccctctccaaggctctaggggagaatgtttccttgccttcccagctgctgatggctcccggtgttccttggctgatggcagcatccttccactctctgcctctgttttcccttggcttcttccccttgagtctctctgtcttttctcttacaaagacattagtcattggatttagggctcacccttaaatccaggaagatttcatcttgagatccttaactagttatatctacgaaggctctatttctaaatcaggtcacatcctaaggttctggatggatatgtattttgggggggcattattcaacccagtgagagtgccatgatggtttagcaagcttgacaggggttcagggctgtgcagggatagggctcaggtcttctgccttctgatctgccatcctgatgtagcccaagcccacagctttacagatgatggtggaactgagactcagacaataaaaataaaagggtcttgaccagtaccatataactatgtaatggcacatgagtcaagaataaagaaagatgaagataaagaggtggggtaggcagttgggatggggaagtgtaggggtgggaggggatgaagatgaatattactgctttggttgtggaataactgagaaaatcatctttgcatttaaaaccattggccaaagaggatctagatgggacaagaaaataataatcagccaactggggagaaaatgtaggagtgttagaagaattagtactgcactggggaccagttttcaggggatcatctgccctttttcagccaaaggaatgagagctcctctcactgggcaaaagcctttccaggctggtccctgaaagcatcgtgcgtacagatgcctgctggttgccatggtgaatgatgctgatctgaagaaatgaataatgtgagcattaggggcggcagtgggattactcagtgttgagagaaacaacacggaaagcccagagcagaggagggagaaggccccattctctcagctttaatctactgcacctcggagggcagagctctaaccagacacgctgcaagcatcaggtaagacatatagatggctcttcttggaaatggaaatggcttcttttcacactctgcttggagaagggccgggcaaatgaatagttaaaaataggggagaatttagaaacggaaacagaggaagaaaaatcaataagggagacggacctggtcctaaaaggtgaggatgctatttgcgtcttgacagaaagctcttaaaaatgtctgctgaggtaattccatctgtacagacagctagtggcagataggaagccaagagaacatttgtgcgtgacaagaaacaggattcctgattactcctgatggaaaggttttacacaggtggctgcctataatgaattaagctcttttcatcgtggtcgaaagtgtatttatagtgatgtgtggtgtggggaggatgagtgtgtagaggacaccaagctaggaaacataaacattcggtctccttcatgatgaccttccctggaagggtctgagcacatccgtctcatccctttcgttccctatttactgggaagaaatattcagccacatagaaagacactattcaccttcctgagtatcttagttcactgttacccttacagaagaaaaacaaggattaagaaactactcaatgctgtgcacctttctgcagctccactcctggaggaaaatgggcacaaacacaagaggatgggggaaagcagaggtgagagaaaggcaggtcataatagccattggtttggcttaatatccaatgcaggcgaaaatccagttgacagctgtttactatgtcactgcaacccaaaatgaaacctacggggtttcatgtgagggaggagaggcggaagacaaagcagggtgagactgttatgtgaatatgcgtaggctgactatgactgtctctgtatttctgatcaggggcaatcagtagagggaactgcatgagagaaactaaaatacttgaagatggctctctcttatcaaagcggggcctggcaatctaaagagggctcatttgatttgtctggaaaaacagcaactgggtctcagtcctggcacctcattttgcgataacgtctgtaactaaacccggcagccttgcattaggaaatgtagtggttaggcggcactaagtcctttttctacgtattagcggtgtgacatcaggttgctcatccgtaaaatgggaatctagctcagaggatgtgatgaagaataaaggaaattaattactgcctgtgaatcatctagcatgacaagtgacatagcaaccacttactgtgagtggttattaccatgattaacattcataataacagcagaattaaatagtggtagttatgctgatattaggggctgattatcttcacccataaaataaatttcctggtaccgctggctttgaaaaaacaaacaaacaaaacaagagcagaagctttggggtgagatcagctgccaaagagtgacgaagcgaatttccactcaccatgggcaacagaaccaggaggctaaaaaaagcagtgggcagaatgttctagatcactgagctcacagtacttggagcagaaacaggaggtcaagaaggaaaattgaggtgaatcaattgcctgaggggaggtcacagacctgagaataaaggtggagcctctgaggttctactgatttctccttaccttttcttcttttttcttaaggggatgagaacaatccccttaagaaaatcccctttgttatctgaaggatctcagctagggtgggatgtggctgggattgcatgggtgcatctgtttttaggcctgaactttggcatgggacagccccagttttaacttttgtcctgccactttttcgctatgcctaaataacagaacctcttggcctccatttctttgtctgtaagatgagggcaatatgagtgcccgtctcaaatgtgcaataaatggtggctatgattatgataaatacatacttaaatcaggggatgtcactcttcactttgattctggttccagaatcgggatgaacatcgaggtggggaacatttcttatacaggagccatcatctcctggtcgtcctcggagccctgcctggaggactattaccatattatgtacaggcccaactggaacagcatcttctctggctatcttcgctacagcttccaccacgaggagaaggtgcctcgaacgatcagctccgtggtgctggaacatcttgccccttccactctctacttcctgtgcatcagctgtaagaaggctgccttcccttacaggcactactgcaccatgttccacaccctggataagagtccgctggctcctggaagctccctggtagacccccagatctccctttgggtgctgatggccattctgctggcctgcttcacagccgtcttggccttcatctgcctccagttctggtgtgtccgttgccatgagccgcgatggtcttacagggctggccacatggaggaggccaatgggttggtgagatggccagaggaggccccggatcttggtcagagggaggaagacctgcaggggctccccctggtggaaatgccacgcaagaactccagagatggagctgaactggatcccgaagccaaccaggatgcccctgatgcgggtgccttacagagggggggtggtgacccacccgctatactgcctcattgtggggaatgagagtggggaggagagcgcccgcatcatgtagcctaaagctttccacacagtaggtcgtttgtacaaatgtgtctatagactacccatttctctcccatcaaacgtcactgctattgtaggtcacctgggttggatgaatgccccatgacaaagcttctcaagctggaaaatgtatcccccagggtatgccaaggcacaaacaaggcatctcagcagcagcgtccactcggaggacacagttaagaattgaaagcattgttttaacattaaaacaaacatggatatgttataaagtagaaagcaaaaatttgcatgacttaaataaaacacagcacttgaaggaaacacttgagttacaagtaggctctcagaggtacacttttgggcaaaggtagatgtccagtttcctctgcccttgaggggattatttggaaataatttgggattatttggaaataatttgtgagaacccttgctctggagtgttttccaacttttaggcaatcacataccaccgctctctattttttaaaaccatggattatcttcactattattaataatactttcctttaaattgactcattttttaagcgtaaacttattttcaaagacagccttatattactccataagtgaaaaaccagcaccctcctgctgcaaacagaagggaagagacataagaataaacatcatgaaaacaagataatattaaataatctgacttagcttctattgcctgccagtgattctgagcttaatgcctgcttgcttgtctttgataaaaagggagatccagtgttggagaggtaataaagacatattagcaccaatatttgtctttctccttgatatagcataaggtttgaaagagaatcgaaaagggaagtgctgtttttactttgcgagtcagtgttagttaaatgccatgtctgtgaaccacctcaaatgctgtcagtcagcttcccttgatttgagaaaattgtcttgaccagactaggcaggctgttctggagaagacgcctgtactctccaagcatcatccaagaccttcccagtaccctcttatatctatagagcacaaaatcccagaatcacaggacgacactgcagtgaatcaactaagaaacagcaggagctgagaagccaagacgagaagccccacatccctattcccttgcctacctcatgcattccctgctcggcacccagacttttgcccccattcctgctacttgtgaacaaataaagattcatatactcacagctgtttctgcctggatcttattgctgcctttttcctttctctttagagataagagtctcgccctgtcagccaggctggagcgaagtggtacaatcatgctcactgcagcataacactcctgggctcaaaggatccccctgccttagccttccaagtagctactggtgcatgccgccatgtctagctaattttttattttttatttttttggtagagacagggtctcgctatgttgtccaggctgttctcaaattcctggcctgaagtatccactggtctcggtctcctgaagtgctgggattaaaggtatgagccactgtgcctgacctcattgctgcctttatctctgcaccttcttactcttctaattaagagacacttttctatttgctttttctcaccaaccctcttctaggcagggtagggcaggactacttaccttggatccatagaggtaataaggctggacgttggcaggtttgtctcgttgtggttcttgggtgaaaggaatggcagtccgcacaaaactagtagaagcatagggatgggaaagagttaatatggtcctaatattattctccatgggacacagataacaggagtgcttcctggccaggtgaaggtttgcactggtacaagtgcactgtttgttaggtggttgactataaaggtactaaactcttctgacatcttcccattcaactgccgtctcctttctatagatgggaaaaattcagtctagattcctgggctcaaccaggggcttgtggctgctcagaatgacactaggcaagaaactaagagtggactttctctagggctccactcctctacctccagtttggtttctcaagagcagagttcagcaaactctttctcaaaagagccaggcagcaaatatttttagctttggaagccagacggtctctgttgcaagtactcaactctgctgttgcagcatggaagcacccacagacaataataaacaaatgagcatgatcgagttccaataaaactttatcaattacaaatcattttcacttgtcaccaaatattattcttctttggattttttcccctcaaccacccaaaagtgtgaatactattctcagctcatgggctttacaaaaacagtcagcaactagatgtggcctgtgagccacagtttgctgctccctgctcaagagtgttaaagctcctaaatctttatagaactggaaatctatctcacttagtgtgtggatccaggtgcatttgtggatatctcccataccctttcattcattcaacacacactcattcaatactggccttgagccaaggcttggagatacctagaagatctgcagatgaatacattttttttgcatccttacatacttattttgtatgtgaatatatatgccttactcttccaccgggttatgaaactttgtggggataaagaaattaggtcttgtctctacctcagtgcctggccccgggccgtgtgcaccttgcaggaggcaagttccactttgtcatgcgtatgtgtgctctgcaaatgtatgctgttttgcaggcatgctttcagatacgtggatatccttacaaacatacaatctgatcatgtcatctcctttcctcaaactctttcagagttaataaaaatgcacgatcctgccctggcctgtagagtactgcacaatctgttcctgtgttatctttcacagcaccatttcccacccgactagttttaccctcatcaacttcttggagaaacccttagaaacttgtctggaatattcttctcctgcctttttgccttatttattcctagtcatcctttgcatcttaactccagcattacttcctcaaagaggaagcctccgttgaggtttgcatgactttttggaccggaataggtggtactgttaccactgtcatggccctgtgggctttccttcatctccttattcactgtttgtaatggtacatttgtcatgtgattgatcacccacatcctcctctagtctgaagactcaagaggcaggaaggtatctgctcaccatggcatgccccatgttttactggagcaggaaaacaccccaatgggcaacttcagagtagcagtagaaagagctcttcaatgaaagacctaattgttaaccacattcaactgtcaaccagctctatgaccttaggcaagtgagacagcacaaagcctgtgcccaggaggggctctgagagacacctgttgcaggaaccactcacacatgtactgggcctagtttggaggaggcagctggccactcccccaacccccacccggccccctctgcacagggattcccttaccggttagtggacccattgtagcagtagttggggagaaagtcaaagttcagttcccagaagacatgcagggtgatacggccatagggggcggacacattgtgattggcctctcggaacatggcatcgaagctgtccagcgtcatatgcttacagagcagccgatgcgtgagccggttaatctccagcagccactccagctcctgtacagagagagagcccacaactgccgaggacttgcttgtaagcattacatgtgtgtgttttatcttactgcttctgttcatgcaagtgacagctgctcagacaacctcctggccatctacatgggaactaggacccttacagtagcaggtgacaaggttcccttctgagaagtggaaggattgtcagactatgctgacagaaatggaggcccagaaggttaagggcaaggtaggggaaggggaggttgcacgcctaccccctggaaggagaccatagaccatgtgcaaatcccttttgggtagagaacaagcttacttgctttccagtttctatgttggtgagaaaaaagcaatactaagagctaccactaattaagggtttactattaggttgaaccctatgacgttacttgttttttagggccaaatattggcaattttgcctggttcaaccaaattagtatgtgccagttttatatgtgtcaacttgtttaatgcttatcaaaccctatgaggtcagtattgctgccattcttattttatacatatggaaaccgaggctttgagaagttaagtaacttgacttcaaatccaggaaactgggctcccaagtgcacattcttaaccactatatgctctaactgctatagaagttttaaaaagaggtgggagcagaatgcctcatcctttggagtgtaggccccttgaggtatcacatggggttggcaaaggcgtggctacaagccatgggcaagcagtctgcagtctgcagtcagctcatgatgaccgggatctatgtgcactgtgggccctgaacgaaggaatcccatcttcaggcaaagtgggacagagtatctgcacacagcaggacatggcatttgttgggaaatgaaagaagagtgtaactctttcaacacgctttggactctcattgtcctgcaacttccccgccactgctatcaaaaggaatcaaagtacagtcttatgtagagacagaaagcaccttaggccactcctgtggtgttttggttaagccatcttttaggatcggtacaatggtccctcattcagagaggggaaattgaggccctgaaggttaagtaacttgcccaaggtcaccataagaggccttaggatgtgaatccaagtctccttattccaaatcatgtgttcttggtccctgtgacacagttccctggaacaaggatgcaagagctgtgaaagtcctttgaaaggcaaagatggctttacagcataaaggctaaaagaacatcggcaaggccaattcatcagagcatggccgggtgggatgaccatagggtcggctgtaatggctggaatatgtccacaggaggcagcctcatgccaaggattcaatttcattctcattagccacaaagacccctagatggagaccagagcatggtcaggtggagatcccaggctatgcttccaatttttggagctctgcctctctgaaactcagattctgtggctctaagttgaagtgtgcagaaatggttgaaggcttgcaaacacacatggctaaagagaccagacaggtcaggtaagtgagatcaactggggtgaagagaaagtttggggagtgggtccatctatggcaaattggatgtccctgcccaggtaaaggtggagctgctacttctgataccccgtctgaccgctgccatgttggagtgggggattagtgatggcaaatcctgcaatttttcaaaagaaggtcagaatttcaattctggaacagcatcggaggaataagtttccagtcattgtgtaccatgaagtaaatgaagggcggaaatacagaatcagctttctgattctgtctcttgggggcctggctagctggaatatgtctttattctgattcacttaggatgggtactaaataaataaaaaatacatggagtaagtggcgctgagtttatttctaagatcactgagtcccctggcacactgcggtgccttgttactgggaagacaactgagaagctggggaacaatttctgtgttatcgttctgtgacttcagcagtctcacaacatacatccgtgttcacaagggaaactgaaggagaggcagaggctgctgcaaccacaggtccacttctccctgcacattatgtaacccagacgatatttctgcaacacatttcggatttgttcttctggccttgaaaccagaagagggcatgtgccagctggatgcagggctcaatgcaccaaagcatggaaaaggcttaaaaagccatgtgggcagtttaggggtctcctaagaggatgacacttttccacagcaaggctggtttactaaagggcaacacagagaaacagaactggggcagtaaaacaccccaatgggcaacttcagagtagtgggagaaagagctcgtcaacgaaagaagacctgattgttaaccacattcaactgtcaaccagctctgtggcctcaggcaagtgagagagcaaaggtctcaaactcagtacagtgaggcctcgtaggtcacacacataaatgaagcctgccactgaggctgtggcaagctgaagaaagtgtagcccatctcacaggaacttctagtcatttatgggcaatcgttaccatctgggaatgctggtctggcattgccagagcttctgcagttttatttgatttcttccaaatgttaaacattggctcaaaattacaaatgtactatgctgtctaaacaaaacacagcctgcgggctgcccgttctcaacttcagcatcgggtcttgctgagactctgtttgctcagctgtgtaaaatgagggtgactaactccccaaatctttgcaacctctcccaactcagaatcaagttgcctccccatctcagaatggagtttttcaggtggagggaaaggctgaggggagctcattcctcattttgtttcttggaggaggtagaagcttctcagccagggcgagcaggggccatccagacccactggagagcgcttccctgaggtctcttcatgggcttcccaggaactggtgttctctggggagccactgccctcgcctgataaacaagggctttcactgcttgttttgattttgttcccagctaaaagaacatttagtgcttttggacaggtgggaagaggccatggagacacacatatcccaaatcttttttttcccataagatacgctcattattggaaaactagaagatacagataaacaaaaaagaaaaaaaaatcccgccacttggagctaatcactgctaaccatttggcataaagaataactctgtttctcaaaatagaggtgaccaaatgatttctcagaaaaatgtgtgctgtactacagtctcctggagtaagtgacccaggacttaggtgggtgggtaggtcaagccctaagaaatcacccaaaatcactgcattgcagccccaaatttatttttctctcatcttttttccataagctattatttattaagtgctaactatgtacacaaaagactcttgggaggccaaggcaggcagatcacgaggtcaggagcttgagaccagcctggccaacatagtgaaaccccatctctactaaaaatacaaaaattaggtgggcctggtggcacatgcctgtagtcccagctactcaggaggctgaggcaggagaattgcttgaaccctggaggcagaggttgcagtgagctgagatcacgccactgcactacagcctaggcaacagagcaagactccgtctcaaaagaaaacaaaacaaaaacaaacaaacaaaaaaacaggtagtatctcattttatccttatagtaaccctaagaggtggattctgatattccctccatttctatagataaggaaacaggcttggagaagctgagtaacttgcacaagatcacacagctagtaagtagcagggagaggactgggaccctaggtatgatgttagagtcccagttcactgtcactttatttttatactttgtccacttaaaataaaaaccaactttatttaaaaataatgttagacttacagaaaagttgtaaaaacagcataccctgcatatcctttacccagcttccccactgttaacatctggcggaaccatagtgcaatcatcaaatgaaggaaattaactttggtacaacactattagctgaatgacaggctttattcaggtttcaccagttttcccactaaagtcctttttctgttctaagattcaatctaggattccatgttgcatttagttgtcaggttcccttattctttcctaatttgtaacagttttcagtctttcctgtctctcaagacctgcgcacttttgaaaagtatcattcacttttttttttttaaatggaacttgatttgggttcatctgatgttttctcataattagattgagattgtgcattttggcaagaatatatgatgataacaataatatgtcttactggtgatattaactttgatacttggttaagatggtgtctgctaattttctccattgtagagtcattcttctctttgtaattaataaacatcttgggggagatactttgagactatgcaagtatcctatttcttctcaaagattttttggttaaaaaaattttgttattgtggtaagatgtatataaaattgaacattttaaccatttgtaggtgtactgcggcattacgtacattcacatggttgtgcaactatcagcaccatccttttctagaagtgaaactcaccttctccaactgaaactctgtatccatcaaacaccatcttcctcttccctggcaacctaccctatgtctccatgaatttgcctactgtaggaacctcatataagagaaatcatgcagtatttttctcaaagttctgcccacttattttagcaaccattgacagatcttgcctacaatttttattatgttctaacggtgattttccatttcccactccttctgttcattcgcttttgaaagcactgaaatcttcctttgattcactgaaagaacaaccagtcaagtttactctaattcttgaagagagagaattagcagagagtcgttttaattgctgttttctgggagaaaggagtaggcctattccaggcttgtgcatcagaaccagttacataatctgcagggtgcaatgtttaatgaaaatgtggggcccccttgtttaagaatttcaagatagtgaagcagaatggtaaaccagctgcaaagcccttctgggccttatactactgtacacctgtgaagccaaccctcttgtgcaattttccctagcttcttaggacccctcacctacttgctcagcctgcaggatcctaaggacatgcagctgtgtctgagggttggccatctctagaaatctcaaggagaccccctccatgctatcgttcccaaggcaatcaggaacgtaagattactcttattctgtgtaagtttttctttcccagctccattcagatgggaaagagactcactgcccctctttaactggcccagcactagactaactacagtccccatctaggcttctagtctgagaaatcacagagcagaaatcccacacgctcccagactcttaccacaatggaggtcaggtcctcactctcaaagcggctgatagcttggtccaaggatttatacatggcggcagagatgcgctgggtaatgagtctgttcaagtcaattgatctacccaacagctggatgaagagagagagagaaaagttacttaaaattcacactggccaggtgcagtggctcatgcctgtaatcccagcactttgggggaccaaggtgggagtgagactgccaggtgggaggggtttcctggagaaactccaaccagcctgtccattgaggtggagcctcgggaagtttatgatgtttgcagcagggaggagcctggcccctcctcttcttgtgtggaacctgggattccaacggcctggcgggaagctctctagctgagggactctggccttgtgagagtccctgtttccctcctttttttcccttttcacccaattaaaccctgctttacctaccctttaaacagtctgcaagcctaatttttcatggtcatgggacagacaagaaccccatctttagctgaactgagaaaaagtcctgcaacaggaggatagcttgaacccaggagtttgacaccagcatgggcaacacagtaagaatctgtctctacaaaaaataaaaaaaattagccaggtgtggtggtgtacgcctgtagtcctagctacttgggaggctggaggtgggaagatagcttgagcccaagagtttgtggctgcagtgagctatgactgtgc

SEQ ID NO: 3314 - DNA, 1030 bp, Homo sapiens
agctctaaccagacacgctgcaagcatcaggtaagacatatagatggctcttcttggaaatggaaatggcttcttttcacactctgcttggagaagggccgggcaaatgaatagttaaaaataggggagaatttagaaacggaaacagaggaagaaaaatcaataagggagacggacctggtcctaaaagaatcgggatgaacatcgaggtggggaacatttcttatacaggagccatcatctcctggtcgtcctcggagccctgcctggaggactattaccatattatgtacaggcccaactggaacagcatcttctctggctatcttcgctacagcttccaccacgaggagaaggtgcctcgaacgatcagctccgtggtgctggaacatcttgccccttccactctctacttcctgtgcatcagctgtaagaaggctgccttcccttacaggcactactgcaccatgttccacaccctggataagagtccgctggctcctggaagctccctggtagacccccagatctccctttgggtgctgatggccattctgctggcctgcttcacagccgtcttggccttcatctgcctccagttctggtgtgtccgttgccatgagccgcgatggtcttacagggctggccacatggaggaggccaatgggttggtgagatggccagaggaggccccggatcttggtcagagggaggaagacctgcaggggctccccctggtggaaatgccacgcaagaactccagagatggagctgaactggatcccgaagccaaccaggatgcccctgatgcgggtgccttacagagggggggtggtgacccacccgctatactgcctcattgtggggaatgagagtggggaggagagcgcccgcatcatgtagcctaaagctttccacacagtaggtcgtttgtacaaatgtgtctatagactacccatttctctcccatcaaacgtcactgctattgtaggtcacctgggttggatgaatgccccatgacaaagcttct

SEQ ID NO: 3315 - protein, 224 aa, Homo sapiens
MNIEVGNISYTGAIISWSSSEPCLEDYYHIMYRPNWNSIFSGYLRYSFHHEEKVPRTISSVVLEHLAPSTLYFLCISCKKAAFPYRHYCTMFHTLDKSPLAPGSSLVDPQISLWVLMAILLACFTAVLAFICLQFWCVRCHEPRWSYRAGHMEEANGLVRWPEEAPDLGQREEDLQGLPLVEMPRKNSRDGAELDPEANQDAPDAGALQRGGGDPPAILPHCGE

SEQ ID NO: 3316 - DNA, 95218 bp, Mus musculus
  misc_feature (1)...(95218): n = A, C, G, or T/U
gctggggacgcgatgcgggtggcagctccaaagtcaccagcacccgttgccgcactaaacaagggacgggactgacctgcagagctcgtaggctgatttcccttgagctcgtgcgaagtgctactccacccgtgcctgggccaagagtaatctctaatccgcgcgtgccgattgctggggctgcgaaatctgtccactgctctccgcgtggttccaagctgagggccccggctgcccaggcctctagggccaatgccgcaagctttgggtttcttggccagactggtggcggcggggtcacggggtgggggggtggggatgcggtggggggggggggnnnnnnnnnnnnnnnnnnnnttccagtgtgaaaaatgaacttgtggtttaggtccaagagatttcacttcagtttgcctgactgctaatatgaactatttaagtcactctaaggactgcagtggctaacaccctgtggcatgaagctagcagtgcttaagctcttctccagcttagagcctggctccctttccttcggtggtgacagctgttgtggactttgcagaaccttgagctatttggatcctgcttcctccccaggattagattacaggtaaagccgagctggaggcgtgtcttggacaggctcgcttttgaaatgtgtaagaaagaaattctttggcagcagaactcctacactactgctggcaatcactattgccttaatttaccagatctgtggaagccgctttgctttgaggggtgggggaaattaacttagagcaaataccgtccctctaacccacaaggaagcaactgccttaagcaaacagaagataacagcctcaggctatctagatctgaagattctgacttgtgggttacagctcggagaatctatctacctgaatgtggcctttgggctcccatctgtctgcctctccttccaatgagcagtcaccttttggaactagcagcttaaaggaaacccagaagattaccctggaggccgggcttgtcccatgtttgctctagaagccaagaactgccagctctgaaaaataggccacgggtgactggcagtccctcagaggctcataggaagtagctacaaaggtcacgggaagtttttaacgactcaaagctagtgaatggccggctctgaggagctgcttcgtttggaatgtgacacgggcacttggagaagcagccgtgggtacaggatggcaggtgttgagatgccagcctaatgtttcagccccatggaagagctggctttggccctgttgtacaaatggctcctctatgggcaggggagttgccttggcagggcagcagaaggaaggtcttggaagatgtgctgcactggcttcagagacccacttcagtattcccaagaggacacaaactggctttggatttctccttcctttcctttcccttcccccacttcaaggttgaacctagaggctcatacaagataagcagaatagctatgttcccccaacaatgcacccccaaagtttctgattctcctatctctgccacctaactgctgggactatggatgtgtgtgacacacagagtcttgctaaattatccagcttggccttcaggttcctttggagcccaggcattccttgaatttataccattgtctgcttcattctcccaagtgactgaaattatagatgtctgtcagcaggcctggctgagttcatttcaaccagaagatcctgggattccaagtaggaaacataaatgtttctttgtctctctgtctctctgtgtgtgtgtccgtctgtctgtctctctctctctggagagacagtttattaagaatgagaaagacacttttgagaagatagatagacatctgctcaaggccttaaaacgcagacttttggggattatttgtcatcaatgatactaccttatgctattaagaatgccatttcaagcggggcgtggtggcgcacgcctttaatcccagcacttgggaggcaggcggatttctgagttcgaggccagcctggtctacaaagtgagctccagggggctggagagatggctcagcggttaagagcattgtctgctcttccgaaggttctgagttcaattcccagcaaccacatgatggctcacaaccatctgtaatgagatctggcaccctcttctggagtgtctgaaggcagctacagggtacttacatataatcaatcaatcaatcaatcaatcaaaacaacaacaacaacaaaaaaaccaaagtgagttccaggacagccagggctatacagagaaaccctgtctcaaaaaacaaacaaacatactaaacaaagaatgccatttcactgacccaactcttttttttttttttttttggcctggaactcagaaatctgcctgcctctgcctcccgagtgctgggattaaaggcatgcaccaccacgcccgacttcaaaagcattttttattaatgtagttatatatgtgagttaggggcggggcacactggaggccagagggctggtatgtggagttggttcttttcctccaccttctgtgtgaattcctaggattgaagtttgcattgccaggtgtatatcaagttgcttttcctgctgagccagctcactagcccctcatcttcaatttcaatgcctcttctagaaagatgctggaactgcaaatgtaaccacacgtgggcctgtctttttttctttcctgttagtgctggggattgaacccagggccttgcggttgctcagcagtgccttgccattgagctacacacccaatctacggtcccgatcttctcaaaaagtcatagcttaacatgaaggagagatttaaataaacacacctgcaagtaaaactgtgactatgattgcaacaggggcaaaggagatggtaagaaaatgaaggaaaagaagggatggctggccaccttctcaacatctgatgtatgagtgtttaaggcagaggaggagaaaagggaaggggaggcatttgtgcaaagcctccgaggcaggaaagagcttggtgtgcatgaggaactgagagaggaccatgtgacagggatgaggaaggcagacaggggacccggggtgagagttgtggagcaaaaggggaaagacttgggtctcaaaggctggcaaggttaacattttattcctagcaaaatgggcagccattgaaaattgtcatcagtagctatgctccaatgctcagtgacattctggtcaggatgtgagaatgaatgcaagtgttagaggctaacagtgcagaagccagttggaggtagctgcaatagctctgggtgagcgatggaggtgactgcgattgttccagtgctgatggatacagagagaggtgacagaattgtagtagacgtgttattaggttgtcagtgggtagcggaagaataggagatacaaagaatgacatccaaagggaaacgaaatcacccaacaactgggatgcctgtattctcatgttccaggtaatgaggttcacaatagtgagatatagaatatagaggtgtcccctgacagaagtgggtaagggaagtgcaggacattagccagcctgattgcacacacttctaattctagcccttgggaggtagaagtaagtcacggttatctttacctgcataacaagtttaaagagagcctgggattcatgaaaccctgctcaaaacaaggaaaaatgggcttgggatgcagctccgttgctcaaatgtgtgtgtagccttcatgaacccctgggttctgtctctagtactatagaaagcagagttcagtgagtggagtcaggaggatcagaaattcaaggtcgtttgtctacataacaaattcaaggccagactgggaaacagaagacacctcctctttggggaaaaaatatattaagagacatgccttctgaggtaacacacatacttagtctaagcactccatgagaagggtcaaaaccaggctgatctcttaattctaggctagactggtctacatagtgagtttcagggcagaaaagattatgtagaaagatcctgtctcaaaaaccaaaaccaaaaagccaaagaaaacaactaaccaaccaattgtcaggaaccagcctcagcctagaaaggggatcctaaggaaggggtatttgggagaataaagtcaattgagtacaagctgacagctctgtcttccagatatttacatagctcttgagatagctatgtaaatagcccagcctttcaaaccaaaccctagtttttttatttgtatatcaattcaatcattaccccaggttccatttgactatcccatgaatcagcattttatgaccttagcacaggattcttaaaagatagcaagtgagaaggcagctgagatggctcagaagataagagcacagactgctcttccaaaggtcctgagttcaactcccagcatccacagggtggctcacaaccacccatgatggggtctgatgttctcttctgggacagctacagtgtacttatgtataaataaatctttaaaaaaaaaaaaagacagcaagtacattttttttttaacactgcaaatgaattcagagatctgcctgcctttgtaagcacagacaataagctagctgggtggactcttgtcctgcaatctccactatttatctatttatctcatttcttaatatctttctgataagctgggtcattagtgcagttgtctctgtttgtttaggtctttgaagctgctcatacaattcatattgcatccttatattttgcatagttgagaagttatattcttttttattatctatctatctatctatctatctatctatctatctatctatctatctacctatctatttgagacagagtttctctgtatagccctggctgtcctggaacacactttatagaccaggctagccttgaactcagaaatctgcctgcctcggcctcctgagtgctgggattaaaggagtgcctcaccaggcctggcaagaaattatatattcttttttttgttttttttgagacagggtctctctgtgtagccctggctgtcctggaactcacttagtagaccaggctggcctcgaactcagagatccacctgcctctgcctcccaagtgctgggattaaaggcatgcgccaccacgcccggctgaaatgatatattcttgaacttatgttttcagagttctttcccacagccttaagggttatcctgaaggccgcagtgtttatcattttgttaaagaatattaaacacaccctcacctcccagaatcctgctgcttttaattattatggagtcattaagcttagcagggagaacatttcctgaagaaggaacatgaagcaaaatatacttattatacaaacaagtttcattcccatagcaaccgtaacactctgggagacccatgtcctgatagctctgctccaggagtgagaaaccatcatgatgtaccttccaaggccatgcaggactctacaaccaaccaacaacaaaagaagaaaatagctaggcagtggtggtgcatgcctttaatcccagcactcgggaggcagaggcaggtgaatttctgagttcgaggtcagcctggtctacagagtaagttccaggacagccagggctatacagagaaaccctgtctcaaacacaaacaaaaagcaaaacaaaaacaaaaggagacaataatagggctggagagacaacagttgttgagagcactagctgctcttcccaaggatccaagttcaattctcactatccatattggatgtctcacaaacagttcatctcaaggtggtctggtacctcagccttctgtgtatgctcacctcactctcaccatacaatttaaaaaacaaaataaacaacaacaaccaagctaggcagggaggtatgtatggttctgtcttgcaagaaaggaatgggctatagggatgcagttgagagttattaatgtacaagcagatgatagctacacccatggtagataaggttacctgggaagaatatgtcattgcatacactagaggtgttacctttcgtttttaggcagtgtgtgtgtgtgtgtgtgtgtgtgtaagagagaggacaaaagagtaaaaaggagtaataaagaggaggaattctaagactacgtaattgaacataattgatagaaaaggtgtctcaaagagaaagaagagatcatgggtgaagtagaacaaacctgaagtctcagcacccactggaggattgccacaaatttttaagctattctgggatatatagtaggttccaatcagcaaggtgacatagagggacagtgtctcaaaaataaataatggactggagagaaccgagagtcttcagaggatccaggttcaattctcatcacacacatagcagcttacacctgtctgtaactccagtacctggaggtgacaacctcttctggccccacaggataccaggcagtcatgttgtgctcagacatgcatgcagacaaaacactcatacatgtgagttgccttagtttgaaaaatttggttgggctggagagatggctcagtggttaagagcactggctgctcttccataggtactgagttcaattcctggcgaccacatagtggctcacaaccatctgtaatggaatccgatgccctcttctggtgtgtctaaagacagtgacagtatactcacacacgttaaaaaaaatatatatatatatttttaaattttttnnnnnnnnnnnnnnnnnnnnnnnnnnnnnnnnnnnnnnnnnnnnnnnnnnnnnnnnnnnnnnnnnnnnnnnnnnnnnnnnnnnnnnnnnnnnnnnacactccagaagagggagtcagatctcattgtggatggttgtgagccaccatgtagttgctgggatttgaactccggacctttggaagagcagtcgggtgctcttacccactgagccatctcaccagccccctaaatttttttttaaagaaaactttggttgaagtctgggcttttcaagtttgtttgtctgtttgttgtcttgacacagggtctcctatagtccaagttgtttgatttttgttgttgttgttgtttttgttttgtcttgtttttgaggcagggtttctctgtatagccctggctgtcctggaactcactttgtagaccaggctggccttgaactcaaaaatctgcctgcttctgcctcccgagtgctgggattaaaggtgtgtgccaccacgcccggctcctactgtgttttaaaaccccagtgctggcctgtggaatggcaggcaggtaccaagcctgaccacctgagttccatccttgggacccacagcatgcaaccagagaaccaactccataataagattgccctctgacatctgctcttgtgccatgatgtgtccctcacccccacaaatacatgtaatagcaaaccaaaaaaaaaaacctgagtgcattgaccttaggactttaagtagttgtgcattttagacaggactttggaggcagtgtggaggatgtgttcatccaaagaaggccgttggaggctgccaaagaggcatagcttagaaagaatgggtgccagaggaatggaggtaggaatttgacgtgaaacagatagggcttggtgactcatcatgggtgactcatctattcctaatttcctaattcaaatggttatgtgatggcagtgctcatagttctgggaggggcagttttaaaggcagagggttttggacaactgttggtgtttcttggtgagctctccatagagatgcatgacaagccgttggatatttgagtctctgtttggtaaaaggcatctggctgatgtgggagttcaaagccaagggtggagctgatcctcccagagttgagtgcagccgagtgggcacagctgtggggcttaggtgctgccctgcatttcaggtgctgcttcacaactggtgccacggaggaaggcagagaggtcttagttacagagacttgacaactgggagagcaaaatcctttgcaagctgaggcagtagagtaatttcagaaggtgagaacacccacagtgtcaaatgtggcagagagatgctgagaggtagtaccgaggacagttctgcaatggtggatgacaaggtcaagggttactgtcagttgagctctctctctctctctctctctctctctctctctgtgtgtgtgtgtgtgtgtgtgtggttagtttgccacgagttgaggaatgaggaagtacaggcaggccagggggagacccactgtttaagaggtgtgcataagagggtcagaaacacttgatggctaattgaagagggcactctaagtggatggttggcttgacagttttatttataggaccaggagaggcttgtgcttgttaaaatctgcgaggtaaataaccaactgctaaggaagctgtcaggagtgtgtgcagggttttttcagttctacccagacttcctcaatcctagactacttacgtactccaacacaagtgagctagggaacacacggagggctgaaacccaatggggagcaggagctgggaagccacagctgtggctcatcgtcatttactgtgatgtccacattacctggtaaaaagaatttcgtggttgccatccagcccttcaccactgcggttggaaagcaggatcagcatccttactgttcccattgaagtgtattagggccacgtatctggggcacattaccgacccaaatgaggtgctactctctgctgcggaccaagaggcaggatgctccatgcctctggtggacggtgcccaagtatgggaacaggagctgaacacagctgttccctcctctaagacagtcaagcagctaaaagttatgtttgtaggaaggtaggagaacaaagatggccaggcgtctgggatgcaggtgaggtagactcagagtggaaagatggcggagctggaggcagcaggtggcaggctcagcttcccgcgctcgacagggagcggaaggcagtgaaaaccaaaaccgcgatttgaacatccgggcgaggcagtgccccaagataaatctcctgtggagggaagtatttaatttgcttccagctctgtcggaagaaactcctctctgagacccggctgtcttccgtatggaagctctcttacctacctgactgttctctgtcccacgcccgtgggctgggccaggagttccattggaattaaagtgttctttttggtataggtggggataaaggagggaaagaatctgggtccagagctaggactttgctctccaccttgccagcacaggcgtcctttatgattgccaccctagacaagcctgcacttaccactgggcctcagtgtctttgtttagaaaatgggggtttggactacgatctcctcgcatgggaagcgacacctaagttgatcgcctccnnnnnnnnnnnnnnnnnnnnnnnnnnnnnnnnnnnnnnnnnnnnnnnnnnnnnnnnnnnnnnnnnnnnnnnnnnnnnnnnnnnnnnnnnnnnnnnnnnnnnnnnnnnnnnnnnnnnnnnnnnnnnnnnnnnnnnnnnnnnnnnnnnnnnnnnnnnnnnnnnnnnnnnnnnnnnnnnnnnnnnnnnnnnnnnnnnnnnnnnnnnnnnnnnnnnnnnnnnnnnnnnnnnnnnnnnnnnnnnnnnnnnnnnnnnnnnnnnnnnnnnnnnnnnnnnnnnnnnnnnnnnnnnnnnnnnnnnnnnnnnnnnnnnnnnnnnnnnnnnnnnnnnnnnnnnnnnnnnnnnnnnnnnnnnnnnnnnnnnnnnnnnnnnnnnnnnnnnnnnnnnnnnnnnnnnnnnnnnnnnnnnnnnnnnnnnnnnnnnnnnnnnnnnnnnnnnnnnnnnnnnnnnnnnnnnnnnnnnnnnnnnnnnnnnnnnnnnnnnnnnnnnnnnnnnnnnnnnnnnnnnnnnnnnnnnnnnnnnnnnnnnnnnnnnnnnnnnnnnnnnnnnnnnnnnnnnnnnnnnnnnnncggccccctgcggccttttggctgcccgggccgggaggccgcggagaaggcggcacggcggcgcggctggtgagtgactgggcgagcggggtgtggggcgggaggcgaaggtgatggggaggttggaggaggcgaacggcgtcgcccgggtggcgggtaccaggtgggtctgtggctgcttcctcgactcgaatcggacatcacctctctgggaaggggtatgtgtgtgacagggagaggggtgcggagacccggcactgtctgggagcacgtgtacgtgtggaggtctggagtgcaccctctgcgtgccggccggccccgctaggccagccgctctagaaagtccagaaggtgatgtgcccggagcaagaatgtgggaagggccccagatgggtccgtgccggtgctgactgtccgaagcctagttcggccccagccaccgacgagtaaatcaccctactatcagcacactctacaccgataaccgaagtccagaaaggaaagcggacttgaggtgtcaacactccagattaaagggagagacgcagggccgtgaggactagaaaagcccagacccttttttcgctacgtactctctggcctcgccttcacacagactgtgggcctgattgatcgcttttctggtggggtgtggagttgggagtggaggaaggaatagcatttgtcgactgacagtaactgtttggggcttcccagtttggaaggcttttgtgacaggtgttcattgtttatttcccccttaggtctgacagaagcaccctaggatcttggtgtctggatacataagaggtatgaatcacttacataattagctcccagtcattaatgttttagagctatatttagtggtttgtattagtgcaaaatgaatggttctggagtcataaacccagaaatttatgtgattctgaactgaatggaacacgtttgagtatgttaatggtgattttttttttttttgatctgtgaagcaggactgcaggattgtttaaatccaagacatgtggggccttttcgtgacgaatacaattatagagggtttgaggctaatgtgaaagtttatttgtttttacttacatgtgtgcttgagtatgtatgtgaaaggcgtggatgccctcggaggccaggccctttgaaacaggtggttgtgagctgactgcagtggttaggtcctaagagcagcacgcactttttactgctgagccatctttctagctccagtgcgattttattctggaagggccagcacgtcattaaacgggctccacctttgattagaaccaaaccttttttgctaaaactggcatcagttttgttttcctggaatatatgtgtagcattctttttgaggactgttgctttgctgaataggctgtagttgctaagatagattgtgtggacatcccatcagggtttgtccaacaacttcaaaagtacatcagtttctggaagttctttttgagatggtaaacccattaatgacagttgtagaagaggaaaaaagatgatactgcctcagccttctgagtagttgtgttacaggcagcagcactaagtttagcagggaggatactgtttactccgtttcctggtgtttcctggtgtctgctctccccactccccagtcgtttgtaactagtttaggttgaggatggagtagttgggatttttaaacgttgttagaacagcagtgcttgttttggttatgggattaggcaggaaaagtgataatttatatgtttcatttaagtacgcttgtaatcagatgaaaatattacgtggcagtgtagttttgaaaacaaagttgataagcttcaagctgatggagcgctatgattgatttcttagcccaggccaaccagtaacagaaattgaaattttaatttagaattagtttgagaatttaatttagaattagaattagttatataaattcctatattggcattaaagtagtttcatagatagtagaaagaaaatctcatgtcctatgaagtgcttggttctgttatcagatattagcactaacatagttcaacatgtttagtttgcccctaataaccatgtaataccagtttcccaaatgattctttctttttttaaaaaaaataatttatttttatgttatgcattagtgttttgcctgaatgtctgtctgtgtgagggatcagatcccctggaactgtagttgtgagctgccacgtgggtgctgggaattcgacccaggtcctatggaagagcagcagccagtgctctgccgagtcatctctccagccccaaatgtttatttttcaaatatcgattcttctgtgaataagtgttggggcttggggatgtagctcagttggtaaagtgcttgctactatgcctgaggccctgggtgcaatcctggatgtggtgccaaatgcttgtaatttatttgtgcaggggaatcagaagttaaaggcatcctcagctacagacttagtttagggatgacctgggctacatgagactctgtctcaaagaaaaagaaaaaagaaagaatgtgtgttgacagttaacagaaaattgtaatagaaagagttcatgggatttgggagtctgacctgactgattactgatttaactttgtcagtggcaatagttattgagatattgtactatgtactaggccctaaagtaaatacttggtagttattgaactttcttttctagatgaggaaacaggttttgcaataagttcctagttacatacttacacaaaccaagaaataagaacttctgtgttgtagacagtaatattaaacttagattgtggttgtcttcgaagtctttaaactgtaagttgcttcttaactgttcttctttttccctttcctgtttcatttcaatttacaaagaacaatatttctaagaggcttgagggcccctgagtgcatgtgaagaggggaggactcagctagttcttcctgagttcctttcttaccctatgcattgtgtttggaggataaaatagaatttcaagagattttgatgatgatggtcttataggaaatggattctgtgttttgtgatgcatgcctttgcatgcagggcttcacagaagtgtaggcagacactattcagagccacgtgccagccccttctgtgttatttttttgttttgttttatacaggcagggtttctctgtgtagccctggctgtcctggaactcactttgtagaccaggctggcctcgaactcagaaatccgcctgcctctgcctccggagtgctgggattaaaggtgtgcaccaccacacccggcttcccttctgtgtttttaagtgcaatttttggtagagtctcaatgcactcgtcctggttggctggccttagattaaaaatttcctgtccaagattcccaagtagctgggattataaacctgtgacttcaggccagtaaaacgggttatttggcagtatacttggtggtctacgtggcctacactaactgtaagtactaaatattagaccttgtatgtgactagagcatacattgagcaggagttagtagcttaacatttattgacaagaacactcttaaaatggaggtatgctaaaagtggttaatctagtgtctgttaaattaatctgctaaattggtagacttgatatgctctaaaatcctagtgctgagacaaattctgaacgctgaacgcaatagtctccctctacacagctcccacccatgtagtttgaccttctgtggtttcagttagtgatcattcagctggggtttgaaaatattaaatggaaaattccagaaataatctagaccagtggttctcaacctttgggtttcaacccctttggcaaacctttatctccaaaatatttatattacgattcatatcagtagctatgtgttttgagtagtgataaaaattttgtactgtcccattgttctggtctagaccctagacaacttttggtctagcacactcattgcctgtgcctactagttggttattagttattgtaagtatctttacttatatagctagcagttctgttgtccaaagaaaaactagaaattacttcctttatttagttaaaggtaagatatttgaagagaaaatataaaaggagtgatcacatccacatagcttctagtatagtataatgttaagttgcttcactattgttgataatctcactgtgcttaatttataaatgaagcttcctcatagtcgtgtatgtataggagaacagtatatatgaagtctggtactacctcagtttcatgagggttctaggagttctgtccagttggtttaaggggactgttgtataccatagctgatctggttaaatcttgatctaagagttgggttacaggatttagcctttgacttttttgtaactttctgttcattgacgtaaactggcctatatatacagagtaactattgtaatcttgaaagccatgttcttggtttcttgaattttcttactttgagagaaaagttcaggatttaggtacatgttttagttttaggttaaacaaacaaacaaacaaacaaaaaaaagacaggcttggtggtgcatgcctttaatcccagcacttgggaggcagaggcaggcggatttctgagtttgaggccagcctggtctacaaagtgagttccaggacagccaggactatacagagaaaacctgtctcgaggaaaaaaaaaagtctgggctggagagatggctcagtgcttaagagcactggctgctcttccagaggtcctgagttcaattcccagcaaccacatggtggctcacaaccatctgtaattgggtctggtgccctctggtgtgtctgaagagagcaaaggtgttgtactcatatgcataaaataaacaaatgcatctttttaaaaaaaagtcaagtgttctggaattacttaaccttaatttttttttatttgtaacacataaaagtgtttttataagtgttttgcctgcatgtatgtatgtgtaccacatgtgtgcctagtgcctaaggaggccagaagagggagcatccaatccctggaactggagttatgaatggttaaggtaaccaaccagtctgttaccatacaaccatgataactactgtttattattacaggtatattgggatctttgaatggttatgcaggtgctaggagttgaatccaagttctgcaagagtaaagtgtttttgttgttgttgttgtttattgatttttattttttaatttttttggtatgaggtttctgagacaggttccatagttctggctgtcctggagctcacttgtagaacaagagccttgattttacagagatctcctgcctctgcctcccaagtgctggaattcaaggcatgtgtgctaccactccttcccataacaagtgctcttaattcctgagctacctctagctctatttttatttattttaatcatacttgtttatgtatctgtgcttgtctgtgcataggaggagtccaggtacctacagaggccaggaggtgttagctcccctaggagttggagttacaggaagttgtgagctgcttgggtatttgaaatcatacttgggtactctggaagagcagcaggtgtgtgttctttaccatcaagccttcttttggccccagtttaatcttgagtaaagtagatatttaaaagatagaatgtcttgaagttaatgataaccattgataaaattaagataaaaaattagcgttactgttatgaaaagtaatgtgtatggttgggcacagtgctgtgagcctgtagttcatggtgaggaggctgaggcacagaaatgattgacgttgatgcttactgagactctggctcaaaaagtcaaaacagattgggtatagtaatgatgacttgtcatctcaagaggctcactgaaaattcaagaccagtctgggctactacctaacaagaccctgactcataataaaacaacaacaaaataacaaaaaaggacaaagtaccgtgaattgacaaaaatactgtactacaatgatagcttaaaatttatttttatgataattatacttcttagtgtagaaaaatgggagtggggctggtgagatggctcagtgggtaagagcacccgactgcttttccaaaggtccagagttcaaatcccagcaaccacatggtggctcacaaccatctgtgacaagatctgacgccctctcctggagtgtctgaagacagctacagtgtacttacatataataataaataaaaatctaaaaaaaaaaaaaaaagaatttaaaaaaaaaaaaaaagaaaaatgggagtgaggaagagatctattaaaaaatgcaatgcaaatatccgaagcaaaagttatttgaggatgggaattgctggagagttccatagaacaattggaacaccagatctgttaacattttagactaaacccacaggtcatattgtgacctttggtagaatttgaggtggtgaaacagcttaacatagatcttagggtatgaaactaatttgttaattagaactttctttatattctgtaagtcttctcttggaataagcaatcaggtaacatgtagaatagttatgaaagaaagttttagaccaaattgtaccttaatagtaggttggatttactctattatttagtttttcttgttttctttacaaaagtattgggagttaaagtaaaggtagaagagtagaaaataataatgctgagaaataacagactatttagactggccctttcttacagaagaagttggtgtctggggagggcaaagggtctaggttgaattcctgtctttgtcaggtatgtattcttttcgttagggtctttattctgcactgtaaccagcctagcagaggtgaagatagtctaaagagatgtgttcattggactgttgaaacagtgagcccccccaaaattgtagctcccccaggaatcttatgtttggagaagagaaagcaaacctaaagcctaagtccttatggggagggaagggaggatggatggacagccacaacactcctcccactcctcccagaaatttacaacttgacatactaccatagagatgagaaaaagggtggaaccatgacctggactggttagtagaaatatgtaactgtagccctcttcttaaatgttaacctcatgttaagacccagaagatagacttggccagggtcactggatctctttgtccctcctcacactctttgactgcttcagttggattattgcatatatgtagaggggttttgctctagcagggtggctgcttgataaaagggtctaggtctgtgtgattggctgggatgaagatgctcctttagtcccaggagacagaggcaaagagatctcttgaattcaaggccagccctggtatagagcaaatttcaggtaaagaaagacttaggtcaggcgtggtggtacacatctctaatgccagcacccaggagagaagtatgtagatctcttgagttctagtcagtcagtttggtttgagttagtgagttaaaaagcagtgctgtggagttgtgaccatttgagatcatgaagttcagttcaggaccacagaggcagttgattagaacaaattgccaacatatgcagatattatgtgttcatatagattatgtgttcatataggcacacttgtgtggaggccaaaagacaacttcagatatttgtcagtggccatttgccttggtatttgtgtgtgtgtgtgtgtgtgggcggggggggaggcggggaatatgcgtcgaatgagtcaggttgacattgggtctcttctttgtgacttttttttttttttttttttggtttttttgagacagggtttccctggctgttctggaactcactctgtagaccaggctggcctcgaactcagaaatctgcctccgcctccgcctccgcctccgcctccgcctccgcctccgcctccgcctccgcctcccaagtgctgggattaaaggcgctgcttgtctttagaatgggtccaagcactgattattttacattggttctggccctctttaacacgggacttttcaagtgctttacctgctggaccctcttccccactccccagctgtcgcctctatgcattaacttctgagaagaatgactcttgagcaatgattctcagcctttgtcgtcatcccctttggggtcacatatcagatattcctcaaatcagatatttacattacaattaatagcaaaattacagatatgaagtggtcagcaaaataattttgtggttggggatcaccacaacatgaggggactgtattaaaggctcacaacattattaggaaggttgagaagcactgctcttgagagaaagaggaattaatttgatgaacataaataacattgtggtgggtttctatagggagggttacaggtctggaaggaatctggctaagttagttggaaaagaggcatagggttgagatgtggcgcatgttcagactcaaattttattgtaggattttgcccagaaaaaaagattccaccagtggtcttacctcatttcattcattcagttgtattaccaggtgctggtttgagtctcatagcttttaaggctgagtttgatgtcgttagtaactgctctgacagttggagtagtggtgaaaagtggcaggagtcctttgcagcagatggaaagaacagtcaaagaaagcttagtgccttgagttggcttgaagggttaacagcagcttctcagccagactaggtttgtgaaggctttcttgacagaaagattattatgtagagaagaatggcgtcaggaagtgctagagcaatttgaagagctgcaaattgtgctgttgtgaaagggatgtaaagtttctaagtgtgaatgatggcagttggaaagtggcagattgtaaaggcttttacaagtctcgtaattagttttttactttggaccccacttccacagtggtagagaaagaagtacatattttgcattatgaaagtttagatactagctagagatcagtgttttaaactatttttaaactaccatttattcaatttatatgagcagggaatcttttgaaatgatttgggtgtattctcattaatttgggaaatgacattgcagacagtgtcaggctactgagactttacacaggggaggtagagaggtcatagtaggtttacatatagctgtttatgaagaaagacttggaaaaggacctgaattggagcaacttccgtggtgcggtacagtgagaaaggctagaaatgatgcccagttggatgtagaaggtgttaaatagtggattctagggtgactggtaaatttcttgctttaaacaaatcattaaggggtagaatgaattgaaaagtttgaggggcaggatattttgaagaaaggttgaattttagctgtctgtgagaaaggatggaggtctcaatctgtgggtctgaagatgagagatgagtgctgaaaactgatgggtagttgttgctgtcacagacattccagtagtgctacactttgtccccagtgacatagttacaaaaacagcccaggggatattaacagttaagtgatagcaggaaacaggagcttggtaacctgtctacttgcctttctatttaggctagtataatgtaaactgcagttaagcagaattgtggtgggtagaaaggacatttgggggccatctttgaagtcctgttttttttttggttttttccttttcaggagtaaatgattcagctttatttgtagcaacaattggtttagtggatctttagaaaatagaaaataatcctgtgaaaaagtatgctaatgtcctttttaagaaacttgttggtaaagctttttaatgtagtttaatctcatgcttgcctttcttgtctttaaaaagatactatttaggcctggaattgtgcttgagaatctagtggtatattgcttgcctggtgtgggtgagaccttggggttcagccccaagcacctcaaataacaaaccataacttaacaatgacagtatcagttttgtagatgcccatgaaggtggtttctaggctaaataaccctgtacagattagtcttctctgggactcacagtacagtcagggagctctgcctgcttctgcttcttgagtgctgggattaaatgaaagtgccaccataccctgagctcttttttttttttttaccccaaaggcacggtcttgctatgtatgtagcccaggctgtcctttgctttgtttgaggtcttttgtactgcattggatcaacatagcagatttggaattgagaaaaggaataaagcagaaaaacaaactcatacaatttctaaagttcacataagccgtatgtatctttaatcctgggaagctgaagcaggaagatgcagagttaaggcccatctatctatgataatcagatcttacttcaacatacagctctctccttctctgacacacagttgacctgcgttcttattagttacaatagttaaatgtgcagggttgtatcttttgtaaagaataatttcctgctgatttcatgcttctttgtgattggtccttcaaatcagcaagcctagaagagtgaaatatgaatcatactgtagtaaagatcatgaatgaaacaaatcttggttttttgaaagcagtgcagtaatgtgttaatgaaagttgtgtgtgtgtatgtgtgtgtatacatctgaggtgttgtaagtctaacttgggttagtccagtgattgactaacatgcaagaagcccaggattttaaacctcccttccccccaatccactccataaactaggcttgaggtagattcaggagaaccaaaaagattggatttctgtctcccaaacatattgaagatttaggaatataatcctctggaaagttttcttattttccttgtcattattctctattcaccctttctagcctggctctttctgtccactctgtttttatattttgagtcctttctgtgcatgctattacttgttgatagtcctattgtaaggtagttagtaatttaatgcattagtaatttaagacatgcacttactaccaacattgtacatacatcaattttgagaaataaggataccaattttgccgggtggtagtggcacacacctttgatcccagcaagcacttgggaggcagaggcaggcggatttctgagttggaggccagcctgatctacaaagtgagttccaggacagccatggctacacagagaaaccctgtttcggaaaaaacaaaaaccaaaaaaccaattctgagcattctgtacagtgacccatgtatgctgacagcaacaataacatttaaaaaccactccagttttagctgtggtaaaatggaaaatagcagtctcagaattaatgagcattgttggtgattggttctaattctttgatttaattgggaatctgtgtgacaacacacgaagtccttttccccaattggtttttgatcgatcaataaagaagccagtgggggctggagagatggctcagtggttaggagcactaactgttctttcagaggtcctgagttcaattcccagaaaccacatggtggctcaaaactatctgtaatgggatcagatgccctcttctaatgtgtctgaggacagtgtactcacatacaaaaaataaataagatcttaaacaaaaaaataaagatgtcagtggctgatagctgggcaaagggagatgtgctagatctgaatagagtgggagcggagagaagaattgccaggttttagagggagacggatcagatttagagctacagaaggaaagtcatccaaaataggtagagagaggtgaaaataggtaggtgagagggaatgtgggccctcaaaagggctgcccagaagcatcttgggcagcaaagtctagggggccacccagaaggagcagggcataaaagatagatcataaatttagatggtgttgagtcaggagtattggagggaaatctatgatagctgggcggatgattagaactgcccagcctttgaactagctaaggcattttaaaaataagataatgtgtgtgtgtgtgtgtgtctttcatttgcagatccaaggcgggtggctggaagtgtgtgtcctgataggagcacaaaacagtgtagctaatctcaccactagagagcatttagatttaaatcaacaatttaaatgtcaaccaagttattagtgattttagttaatggtattatagttttaagctgaaactaatttgtgttaaatgggagaaactttcatttatattattcaaagaaatccttaaatctgtattacagattttaggttggagtaattacactcgtttggcaatttgccttgtttacgtagacagttatacaaattcttgttttcttagtccttattcagtgtctctattatatttcatgtttgcttgttttaaaataaccttttgtttcagtgagattttactttaaaatccactgtcaccaccctcaatgaggcagggaacactaaagtttacatttaattttgcagaggaacttgaagtatatggtactggtgacctttactctaaaatacttaaaagaatttcttagttaatgataacactttggtatacatttttgagacaggatctcatcatgaaactgtgactaacttacatacaactcattgtgtagaccaggctggcctcaaactcacagtgatcagcctgcctctatctctagagtgctaggattaaagccatgcaccaccattcctgtcttttgtaaatactttttgattggtacaaaagttgcatattaatcatatttctttttttcttgtatagagctgtcctggtctcttatgatctgactcatttgtctttcataagctattcatacattctgttggcacacattgcacacattaagatagattcaagggcttaggttttgttacaaacagcacagtaggatatgttttacccatacatacttagtatagataacacatgccatgaatattgattagaattgttagattaggtatgtatagattccctttcttttcttggggatcaaacccaaggttttctttttattgatctgtttaagaggcaggaaggaccttatgtagcctaggcttaagcttgtgtgcttcttgccttagcctcctaagtattacaagtatgcacaactgcttctaacccaaaatcttttttttcatttctctgtgtagccttggttgtcctgaaactcactcagtagaccaggctggtcagagatctccctgcctgtattacttttttttttttttttttaaattttaaagagacagtgtcttacatagtttaccttgttggtttcaaaagtcaccgtgtagctgaggatggccttaaataccagatatcaggtttccatttgcaaaatgttgagattacaggtgtgtgccacctccacgctaggctgcagcggctcttctgttataattttaagttgatctataaagcagtgaatttcattatgtgacatacaagatactatattttaattagtgtcccctgctactaccctcctcagaatctctgtattatggtataccttgcctgtttcttgtttttcatcaccaatttaatggctaagtgttttaccacatagtttaggctttatttatttatatttttgttttttgagaggatcttattattgagccttggttggccttgaactcacatcattcccagccctcatggtttttgttgcgtatcttatctctcatgggacatatttcaaaagcaaccccttttcatatcgactaaacaacttggtatataataccttatctcttctaatcactgaacatcttagtcaattccagccatctttttccttagcaatattggattgccacctacaggtgaaagaatgcaacagcaggttgtacatagtgcctatgctttgctttgctttcttttttttttaagagtcagtctctatatagccatggatgtcctggaacttaatatgtagactaggctggccttgaactcacagagttctacctgcctctacaccccccaccccccagtgctgggattgaagataccgtgtcactacatttgcctgtattcttgtaaggcaaaactttttcatggttgaatccaccttaggacattatttcaccaaccttgtagtagtggagagattgagaccaagataagtgaagggacgctcttaacagttcttagtggattgtcttctgtggacaagttaaagctggcactcctattttggggcctttctttcctttgctttggagaggagggaagttatattttcctttttgttttttgttttatccagacaaggtttctttgtagccttggctgtcctggaaatctggatgtaggtctgtagatttgcctggccttgaactcatagagatctgcctcttagcctcctcagtgctgggattaaaagtatgtaccaccaccatgtcttttttttttttttaaagcttgctttaattttttaaggtttatttatttatttatttatttatttattatatgtaagtacacggtagctgtcctcagacactccagaagaggaagtcagatctcgttacggatggttgtgagccaccatgtggttgctgggtattgaactcaggacctttggaagagcagtcggcgctcttaaccactgannnnnnnnnnnnnnnnnnnnccagccccccccccccctttttttttttaaagcatcttgtcttcctgtgtctccctggctgttgcagaactcactataaatgggctgaccttgaacttttcaacatctctaagtacactgtagctgtcttcagacaccccagaagagggcgtcagatctcatcacggatggttgtgagccaccatgtggttgctgggaattgaactcaggacctttggaagagcagtcggtgctcttaaccactgagccatctctccagcccaagaggttctatattagaaaaacaaaacagataaaaggcaatgtgcttgttaaagaaatagctttgaaaatgccaaaagtaacatgacttcagttgcgatctaggcagagagtgaagattttagggattatgtgtacattagacagtctttcttctgggtaaaaccacctaactttctgtcttactgcagcccagaggatggttaccaccagttaattaacacgttgacttttgttgtttgttgcttttgtttgttgtactttttcccccaagacagtttctgtttgtcctggttgttctggatctcactctgtagacagtctggtctgtagaagcttctcctgctgctgctgggattaactcccagagtgcttggattagaagtgggtcccactgccacccagtttacacgttgtcgtggatagcagaggtactattcttcctaggctgtttagtcctgcaagttataactcttcaaactcttgcctgctgtagcatttttcataatggataagaatttgaagttgatgccgggcggtggtggcacacgcctttaatccgaacacttgggaggcagaggcaggtggatttctgagttcgaggccaggctggtctacaaagtgagtttctggacagccagggctacacagagaaaccctgtctcgaaaaccaaaaaaaaaaaaatgaagtcgatctagtcattataacactttgctaactctttgaacatggacttcagaaatgttacatacatgagaaagaaatatgagacttctagaaccttagtgacttgaataattgaaatgttttgaatcgcataagtagacttgaagtttttagtccagatcacatgaagtagaagatgacttcaaactccctatgcgttgaagagaccttcaattcttggtcctcctgctcctttaaattaatttctaggttagcatacaaataatagtttcagtatggtgctttctcatgtctcactccctcactttccccattcccccttccttcttaaacagacatttttaaaatgtagaataaactggatagtatggtatatgcctttaatatcagcactctggaggtagaggcaggagggtcacattttcaaggccagtctcagttgcatagggggttgaggggcagcctaggttatatgatattgtcttaaaatcctaaaatcctaaataaataaataagcaaacaactcaaactttattagataaactattttgtctcatgaagacagctttttaaaaaagatttatttttatgtatatgagtacactgtagctgtcttcaaacacaccagaagagggcatcagatcccattatagatggttgtgaaccacaatgtggttgctgagaattgaactccggacctctggaagagtagccaatgctcttaacccctgagccatctctccagcctgaggacagtcttaaccatttggaataccactaaataaaaatgttcattaaaaatagtatatataaagtgatttaaaaaacatgaggaattatattgtatggcctaattataacttattttgttataactctcatgttgctctataacatagaaaaaacatactatacaaagccttcacttgacaaatgtaaatacagtcttagtttggtgtatattggacacaatagtcttccttaagcctaaacacagaaacaaaagcatgtattataagagaaagtctaagatgggaagtgataaaatgggtattgagtaaacctttgttaaaatgaagctggtatctttgtaaaatttccacgtattcattaagctatattatgtcattttattgttatgttaggagctgatttggagttgagttctgtcctcagcgttgtcaacagttcgcttactatggctggaagattaagattttgttactctttttacataggtatttatatagatagtaagaagtaagataaaaattgttcattgggcatatagaatttgaattgtggatttgttgtgggtgctataaatttgaaaatctatgccagttgtggttatttatttgttgaagcatcctttcctgtgtcctttggcttttacctgggtgaggtggtaaatgtttgtaatctcagaacttggaaaattaaggcagcttaggctatacggagagatcttatctcaaaaaaaggaatggttacttaaatgttaaatgtttatttaaatttttttatttgggtgtatatatcatggggggaagcagggatatacatgcctcagcaggtcagaaacaactacatagaaagaacaggacagcctgggctacttgggagtctccaaaaaaacaaaatataatacttaaattgctttgcttaaagttttacttaagttactgatgactttgtaaagcaccttgtgaaattaatcctttggaaattctaggcaggtttaaaatttttcatttcatttaatttttgagatagcttcagattgaccttgaattcagtctcctgaatgctgagattataatacacaccacatttggctcagatgaagtattacagtattatgctcatggaaagcaaagatgtctaagatgtttgctgagttctctgcaagttgatgccagtttgtcttgttttagaaagtaagctctgatcaacttctagaacaaactatagactaatttcgatagttcttaataattatggaatgtgggagagggtggcgtaagcattaaacttggtgacttttatttctgatagcttcactttatcctcccctgcattttttttctcccgatgaagtaaatccatttcattataaattcaaggaagggtttggttaaggacaatagcctagccctttgctgtttagataacatcaagattcaggcatgcactgtaggccagaacttgtgtatgcagcaggataggatttattcaaataggagttctgccagtgacaaagaacagaagggtttatcttctaaaacaatttaaatttgctgaattaaaaagttctaaattttaatatcaccatttcagagcaatttaagcagaaccagtatttggcattaaattttaatatttgtatggatttttatggttctattttatatgaagagccagcttttgaaagctgatatatcaggatcggagaagaataatggtataatgctgttggtaagaaaaaattctttattttctgtgatgtagaaattgacttgattaaaaaaaatgcattctagcaagccaccaaagtgtattttcaaagctccttgttaatgcttcagaagacttagattaagatgtgtgacagaaacacatttaatatgcaacttgatttcatttgtattaatatatttttatatagttctttgtctttatggtttacttataaacattaacatttaattatacctttacaatatgaatgttttaaatgtaagcacagttggattgtgagttttccaagtgtatttgaagggttaattcttggtaatttcctgtgaggtgtatgatatatttaaaattaatgataatggatgatttttagagcatttttatatataaattttatcattttgctaactttggttaatttgttaagctgttagttctgtcttaaagcagttgactcacagagaagtaattcttacataaagaactgcagtgtaatagggtcaatgattgttgaggaaaaagtataggttgtcctacccactaaatcaccatatgataactcaaataattggagtattccttgctatgtttttttaactgttcaagattttgagaaaaatattagaataaggtcaacttgttagagaaattgagggaaatatttcttaaatagtaaacaggctcaatgagagcattgaattttaatggcaacttcagctagtcatactggttcatttctataatcccacaaaaggtgggaaaggagagataggatgagaaaaggggaggaggaaagagggagagaaggaagggcagagggagagaggaagggaaggagagaggggtgtcaaaagcttgtgctactaatctgcatagtaagctccaggccagtcagggaagaggttagaactgataatttaaatgtaactagccattggtatttcttatgtactgccaggactttgccaggtgcttaatcatttatataacgtggtaggctgtttacatttaacccatgtttatccctttgctattcttgacaagaaaaaagtgtacatgtttagtactggtgcttcgtcttcccaaatatttgttaatccctggttggttgaactctcaagtctcctgggactgcagatacagatcagtggaagaacactttgttatcacacacaattccctagccaggcttctccagcacctcagaaataatgctggctgattctgcagtgacagtgacatcccagttcttgaccctccactactaccataaaactcagtatgattcattaacccatacctactgcagttttgatataatttaacttctgagaggaataaccttttttcatcccttagctttagagaagtcttatttatctactttgagctaaaatgctttacagaactgaattcactgtaaagcatcaagcaccagccagaaaaccagtctcacagccttttgggggagtgtgtgaggtggggagaggaagagttaagtagctcagactcctgggactcatgattgtcctgcctctgcctcctgaatgctggggttagaggtgcgtaccaccagatctggatcttaagagagtattgttcctaacaaataatagtaattccaaaccaaagttttcttgggatagcactcagccaaccctgcctgactccagggacactgagcaatccttactctatgttctttcaccctatgtctagggtgaaaactcctgagttcactgacaactagacaaagagataacttaaaaaggagaggaagagattattaaagaaatttatgaaatgtaaagtgcaaccacttttcttgccaaggtaatagaaattacctttggccgggtgggggtggtgttcaatcccagcacagaggccagatctacagagtgagttccagaacagtcagggttacacagagaaaccctgtctcaaaaaaccaaaaccaaagcaaataaaaaacaaaaacaacaaaaatttgttgttgagacagtcttactatgtaactctactatgtaaatcatgctggccttgatctcacagatctgctcacaccttctaagtgctgggctgagattaaagttgtgagctatacctggtatactaaagggttttgtttttgtttttatgacagcatgttctttgatttcatacccatgtctaatgtgtatggatttcacatacccatccttttccattgtcttctcatctcccacttccacagaacaattggattggttttttttttccaacaagctctcctgctttcaagttctgttctgttttttgtttttgttttttgctattatccattgagtttaattagggttgatgaggtaacttgtgactattcaactgaagaaatggactctttcccccagcaaccattaactgctaatagctcctcaggggtgggggtctcatgagccccctctctctccacgatgaaatatgaaatactgatgggcagtatttgctactgtgagttagtgagtacagctgtcatgtcatgggtggaggacagtatttcacaattttgtttattttttttctttccagccccctataattccatgatgttctttcagccttggagagggtgaagtagatgtcctaagtgtttagggctgagttctcaacatttattcttccagttatgaatcgcttactaactgcagatgtttctctgtccaagattgagagcagcaataatctatggatataaaaataaacaattgcaggtagtttgcacaaagcaaggataatagatttgttctcacaggatctgagacttcccaagccattggctttagtccaggtttacaggttaaaacatgatttccctcctgtggaatgagtcccaaatccaatcacaaagtggttggttacgtatataccagtcatgaccctgttgtacccatgagtatattttgcctgacatctggtattgtatagagtgtatagctgagttcgactattgatgacttttctccagtagcagcttgcatagcaccttttagcagtagggaagctattcacaggagaagtttctagctcagttccaacctgatttctcagtgtatgttgtcatcagcagtggggttttagcatctagttctggtgatggccaagatctgtttttaaaggaagccaacatttgtttctttccctgcagttatcttcacctgttgtgtgaagcatagcacctttcaagccactgtagaaatggacaaagaagaaaggaagactatcaacaagggtcaagaagatgaaatggtaactaactttcataattttctagggagtaaaagtatacagttaaagaaaaaccaacataggctgagggatagcccagtggtggtgtatttgtctacctaatgtaccgaggctccaggtttgctcgatagtgaaacacccactcacaacacacaaatcggaatctctgtatcctgactaaggctctgtgtgtgtgtgtgtgtgtgtgtgtgtgtgtgtgtgtgtgtgtgtgttcgtgtgttcgtgtgttcgtgtgttcgtgtgttctttctttgttttagacagcaaagtttcactataaagccatggctgtcctggaacttgaccaggctgccttcagtctcagagttctacctgcttgtgctttccaagtaagtcctagaattaaagacacgagccattatttgccaggacttgaggtagtggtggtggttgttgtcatttcatttcatttgattgattgattgattgatttttgaggcagggtttctctgagtagccctggctgtcctggacctctctgtagaataagcctcaaactcagagatcagcttttctctgcttatctaatgttgggattaaagttatgctccattgtctcctgatacttggtttaactaattaattaattaattttggttatttgaattgaggttatatcatttatgttggttggatttttaaaataattcatttgtatgtacactggtgttttgcctgcatgtatgtttgtttcaggtgtcagaagccctgcagctagaggtatgagctgccatatgtgggtgctggaattgaacccaggttctctagaagagcagctcttaacaccgagccatctccaggcctgcatagtttggattttactatagagccttttcaaagtttttattttgttttaattgttgaaggttttcgttttctcttgtagtttaatcacagtgaacagtgagtggccagtttctttttccatcagaagcacgcctctcctccagcgtaacaagtttcctcctgaggggagacagggttttcaaacacctcagtccttatcctgagaaacaagtaactttagatgcatttcatagcctatgtgacatannnnnnnnnnnnnnnnnnnnnnnnnnnnnnnnnnnnnnnnnnnnaaggaaaggaaaggaaaggaaaggaaaggaaaggaaaaagccctgacaggacattatgaagcaaggtgcgttcagtgatgctgatgggtttggttttgttggtctccactgctgagtgtgcagtctactcttaaggtgggttgtttccccagggtctcactttgtttttcagctaatctaaatacactctgttgttcagagtgggatcgtcctttactcagcttctgtgctgagtgctgctgtgatgggaagcacagccatcatgcttagttcctctttcctgtttaaagtgatagcagctggggaaagacatggttttgtatgtggtgatttaaaatgttagttagtgctaaaatatctccaataaaagtctcggtcggtcggatggtccatcattccgtcaattggtctgtctttctttctgtgtctttgtctctgactccttctccccctctccccctttccctctccttctcctcctctccctgtacctctccccttcccgtccccctccccctcttcttgagacagggtctctttatgtaaatcaggttttcctgggatttgtttcctacttctggaagtgccttctaggtgccaccatacctggctgtctatgtaggtacacatgtaccatagtgtgtatgtggtgggtgtcagaagacaacttttctgaagagttttttaggttttaaaagttgctttagtgattgaacttaggtcagcatgcgtggtaagcacatttagtctctgagacatcttgctggttccccaagtaaagatttctatttgtggtttataaagttaaaaattcagttcaattaaaacaaaaactctggctggagagatgactcagttaagagcaatgactgctcttccagaggtcctgagttcaattcccagcaaccacatggtggcccacaaccatctgtaatgggatctgatgaccttttctggtgtgtctgaagatattttatgtactcacatacataaaatacataaatcttaaaaaaaaaaacccaccagaaactcagttttttgttaggttacctttaaaataatcaaagaataaagttttctccttgctctatagtttaggttggtttcaaactcacatttcctgtcctgtcttagcctcccaagttcagagattataggcatgtgtcaccacatgtcaagtaataagttgtaattatctcagatgttgccatgggataaataatttctattgcttgaaattaaaacttcaacagcttgaaatattacatttggtagcccttgtgggtgagaatgcaagaatatttaaattaatttgagttagagagtgaagttaattaatccaatggtggcattggaacaattttcaagtcacttaaaacaaacaaaacctatccaaatgtaatgtgctaggcatggagatgcatactttgtaattctagatgcaagaggcagagaagcaggagggtcatgagctggaggccaactttgggtacagtcacctatatctgtgtgagaccctgtctcatggcaagcacttatactgtctgagccatctcaacagtctaggaccctgtctcagttcatccagtcagcccagtgagggagtgaatcagtcagtcagtgactgcagtgtattgatagtacaggaacactgattttgacagaagcaccagatgttagggtcatgggaaagtggatggaagggtctgtatgaaacactgatatttttacagtttgctataagtgtaaagtggttacagaataaaaactttatttttaaaaacccacctgaaaacttaagtttttaaaaatgaaatgataaaattataaggaacaaagctggtgagttgggttggtgggtggttaagagcaccggatgctcttctggaggacccaggtttgattcttagcacccacattggagcctataaccatctctatgtaactcagtttctagggggcatccaatgccccttctggttgtcaggcattgtacacacatgatgtatagacagaaggcaaaaaacccatacacataaaataaatatatatatatatttatttctcattaatcatatatatatgtgatgtgttagtagcaaagaattattagccataaataaaacatgatcaacaaattttactgttaaatctaaaatttgtgtgatgaacttactgaaaataacaggtaaattagcagttgagaaaatacagtttatatgcaaagaaaataatatgtaactgagagcaattttttagtttatctgccttatcatttgctcatcctgtgattgccatttctgtgcaggagatacatggctataacttatgccgctggaagcttgccatggtttttgtaggagtgatttgtactggtggttttctcctcctcctcctctactggctgcctgagtggcgagtgaaagccacatgtgttagagctgcagttaaagactgtgaagtggtgcttctcaggacaactgtaagtccatgcgtatattagttgatgattcaaggagtaaaatagtggttgtgtataaactatttagaataagtaactgggactttattgccaggacatgataaggaattttaatatttttaagtatggctttgatatgatcaaagtacccagtgattaggctaaaaggagtgttatagctgatgagactgtcctcttatagctcttcatgacccacagtattggatattttattgtcttttaaggtcctggctctttaggattatagcccatacacctcattaagttggccagctattgagtgtaatgttacatcttaagaaatttgtttagaaccttaattggaagcatttagaggctgtaatatttaatgctcagtatatatgtgattaaagaattgtgaacttttattaaatctattgatagtttgtattggtaaagtgtgtcaaagttgatgagaaatctttcatgctaaatgagtatgaaatagtactttattagcaagagatgactaaataatagcatttacataaaaatgtaggcagttatttaatattcataattaattggcctttctccctttcttctaaggatgaatttagagtatggttttgtgcaaaaattcactttcttcctgtggagaatcaaccaaatttgaatgcaaaatgtttagttaatgaggtttctaatggccatgctgttcatctgactgaagaaaatagatgcgagatgaataaatactcacagagtcagtcacaacaggtaccatgatggactgtcaaagctgtgaaaaaccgttgtttacattctacattatcaaagatacagtttataatttcatatttgcagttactgcttgaaataaaagctttgtaaagtacctgtcactaaataaaacttcagggtttttgttttttgtattttattttttgtttttattcttttctcatatattacattccaaccgcagtttaccctccctcctctattcccagcccctcctccaaaaactttaggtttaatagaaagtgttttttatttgatatatgataagccttttgatgtaatattattatgttctacagatgcgttattttacccaccatagcataagatatttctggaatgatgccattcacaattttgatttcttaaagtaagtatctttagtttgtttggaatatgttatgaatatttttaaatgttttagtaaaagtggctatattttaatgttaacacaaaatcattattcacttattaacaatttctttgaagtttcattaaagtaagtgtcacctgcaacttgtaccttggagaattttacataaattttttttaaaaactgcatacagtggtgcatgcctgtgaccccagcagtcagaggctgaggcgcatgaataatttgagtgtgtcttgaagcttaggttttcaagttgtttctttgttgtttagttttactcttattttggtgtgcactcggctgagcatctgggactcatgtactgataagaggtgactctcagtgatccccactcccccaatctctgtgcttttctctagagtatctgaattatttcttcctatgttgatagtcccatccagttgtactcagaggaacatgtaacatataattagatgagaaatgacactggcaaatgctatctttgggtaggacaaattggagtaatcccttatttgttttatttgtgtgtgtagaaatcaaagttaaacaaagattcactatggtttagactttatttaaaagatggggtcttgctattttgctcagtttaatatccaatttcccctcttagcctcctgaggattctgttttgccattactatttgaaacattcattaaatatccttgcactggaatgccagaaaagtttataagtcttaacagtaaaaacaagaatcaagaacatttaatacctggaatgcttacctagaatactaaagaatgttctggaattgttcagtgattttctcatttctggttctgaaattgaagtaccaatgcttaggggataaattccattgtcctgcaggcttgttaaacactttgttgatagtccctctttgtaccaaattctggagaagtcatcagctctggtggaaagaatgtctaacataacttgttgtgtggtctctgccagccattgaaacttgtaaaatttaaatctaccataatggtatcaacaaattgtagaacttagctttactatatataaaatgtagagattaagtagaattaatgtgtttaattctctttgctttagagttgtttggctggtatctatgaaaataagcataattatattttggggggaaagcagatatgctagttgaatcttagttagaattgttctaggtcttacacatttatgatcgtcaattctatactttgaaatgtagtagtcacgaaaggacttattggtgcaacttgtggaagaaaatgagtagtaaatctttagtttgaaaatctcattagtcacactttatcttaacttttatttgattgttgactcataagctttggaaactgttaaaggataatgctgctatgtatgtttttttatatagtattatttagagccatgacaaatgtagtggataatttagttgtgtttgagatttaaactgattgttttatattaagaatttgagattttaaaattctcaggacttctgttttttgttaagaatttctaagcagtttgtaaggaagttacagttataaaattgagcatatagcaaaatgaggcaataataaatttggatattttaaactttgtttaaagtaaaaactttggatttatttaggggactggatgaaggtgtatcttgtgcatcactttatgaaaagcatagtgcaggactgacacaggggatgcatgcctacaggtaactctatgtgactgaagtaggtctgttctccacactcccaaacccacagtgcacacagacagctctcccacataatgtagggacttaagtactacattctgttagttacaccttactcatattttgagcaaaactctctcataaaaaatgttaaagctaataatcccttaagtattaccttttaatcaattctaagatgcaaatttccccaccttttcctatctctgaagttgggatgtgttgtgtattgggtagaacgtcctgtcagtctcacatagtggtgtgctctctaattagtaactccttagactttctgatgtggggattgtaagcatgtactgccatttcccacaggaaactggaagctgggagccatgattttttccctgcttctttttttttttttttttttttttaagtataaaaatatgccagtgtcttagcactcaggaatcacaggcaggtgattttgagtgagtttgaagccaacctggtctacaaagtgagttccagcacagaaagggctacgcagagaaacccagccttggaaaacaaactagcatattgccagtgtattgcacattttaaagataaatggtttttttaattgaattaaagtttttttaaaactgttgtaacgtctttttcaatgtttaaacaaaaaaattgattcagtcttagcaccttataaaaggttacaattataatagtatacatgagagtgagatgaagaaggtatgggttttagagggagcagagccttttttgggctaggcaaatactttacactgacctatgcacatcttccccccaccccctccggtttttatgaggcctcaggtagataaacctgaccacactcactatatagccaagggtggatgtctttataacttttgatcttgaatttgcttcccaagtgttgggcttccaggaaagcaccaaccatgtcatgcttggtttatagagttgtttgggatcacagctagggtgtgtggttgacagccactcttgacagtggagcagcactaccagcctctaagcaattttttggtttggtttggtttagttttttgagacagggtgtcccaagctgtcctggaactcactctgtaggccaggctggccttgaactcagaaattcacctccctctgcctccccgagtgctgggattaaaggcatgcaccatcactgtctggctaccaattttaagaaagtgttttctaaaagatttaaaatgtgcagtatttttgaaataaattttcttagtaaaatattcttgctagaaagaagtagggtaagatttgtttttacaaaaatttagttaaatcttaataaaatttgttctgtttgatgtctcagtggttaagagcactgactgttcttccagaagacctggatttggttccccacacccacatggcagctcacagctgcctgtaaatccagttccagaggatccaatgctttcccatggcctcagtgggtagtgcatgcttgcggtgcatagacacagttaggcaaaaacatccatgcacatgaaataaatgaaatctcaaaaaaaaattccctctgtgcaggaagagaacctgtgatgtgttgtgatggcttacacctatagtcccagcacttggaaagttgagacaggaggattcccatgagtttgaaggtagcctgagtggtgtaaaagtttcagggtagccttcacgtaataaacaaagtgagccttttgctcacatggttattattgattagtaagaaagatacttgggggggctgaggggggcagagagatggctcagtggttgaaaagcactgactgctcttccaaaggtcctgagttcaattcccagcaaccacatggtggctcacaaccatctgataccctcttctgctgtgtgtgaagacaacagtgaccatgtactcacatacatacatacatacacacacacgcatacatacatctttaaaacaatgaaatgtgtcacatacaaaataggagtctaaaggaagtaaaccgctaaagtttgattaccactattgatatctttgatttaaatagtgtagctagctagcaattttattttacttcatttatttattttggtttttgagataggatttctctgtgtatccttggctgtcctagaactcagtctgtagacacagttggcctcgaactcagatccagctgcctctctctcctgagtgctgagattaaatgtgtgagccgccatgacctagcagcttttttatttttaaaagtagagaattttatagtcatggaataagacttggaagcatgaatctcagaatggttgactttagccatatctaacataattcttcttctaaattattaatataattactgcatttttctgtcatagaaagttgatttatggagtaaatgaaattgctgtgaaagtgccttctgtttttaagcttctaattaaagaggtaagactttgtatataacccaacaaacagtagagtcatccatttggaaagagtcatgtttaagaagctgttcttagtttcctgctttgcttcatattttacttggaaggtaaaaattgaaaaattcttgtctagtagaaaaggtatgagtatgcattttttattatatagatttctttgtgtctcgtctccatcgtaccctggttaagtgtttgtgacttgctcccttgctcctttacttcacattggctagtactggaaactgaacatttgtgttctgagaggaagcatgttagttcttgcagtgaggattcatttataattgcctgggctttctgaataaaagattaggaatgtgtatgggaagttggtgagtaactgcccagcagaaagacttgccagtctttctttgggttttggctatagataaaaagtagtattgggcggatactttactagaaacaatgatgttttcccaccactttcttagagcagccctttggtgctgcctgagagaatagtttcaggtatgattaagacatttaggaagcctcatagtttgagaggatttagccgtctttggtttttttttgttttttgttttttttttgttattgttgttgtttttaaaagaaaacatttctacttgctacttcttgtatggataaagtttggatgatttcttaatatttcatttgagtttgaagtaaaatggttctttaaacatgaaaatggtttgaaaaacacaaaaggcacagtcgaaagacattgggaagtaattaagaaaggtgaagataccatttcataaacctcattaccagggctttctatgtagtcttacttttattcaagattaaatcccaagaagttccctttgcgagagcaaggcagccattgtcatatttactttttctttctatgccagtgaacttttgaaacataagtgaagttttcttttgtgttctttaaagcaagcatttgctgtttgactaaaagttgtatgttttagcccaaagcatagaatttgttacaaataaatttactttaacattaaagtataatgcagaataccaacatttatacatgttagctttttctagttgaacctgctttttgggtttggtatgactctaaattaatgtaaatagcttaagtttataggattaagttttggtgttcattggtaagaaagagtatagacgcatcgtgtaagaggctggctgttgactgctccagtccagtatgtggtagggatccgtgtctgcacttcctccccatcggtgatggcgctttctttgtcttgtcttctcttactaggttctcaacccattttacattttccagctcttcagtgttatcctgtggagcgttgatgagtactattactatgctctagccattgtgatcatgtccgtagtatccattataagttcactatattccattagaaaggtaagttaaaatttattacatatttcagaaatatatttgcatttttaataatttgcaaggtttgtagaatgaatagtacttggtattaagtacacgtattgttatatttgcctgagtacacatacacactttcttctttttgtttgtttatttgttgagacaaagtagctaagggtggcctttaactaatcctcctgcttttagcttggccttttgacataaaaatatatatgcactaatgttttgcctgcatttacgtcagtggactgaatatgtgcctggaggactaagcagtgtttgtagccatcgagttatgtctttagtcttggcttttttttttaaagatttatttattattatatataagtacactgtagctgttttcagatgcgccaaaagagggcatcaggtctcattatgggtggttgtgagccaccatgtggttgctgggaatcgaactcaggaccttcagaagagcagtcagtgctcttacccgttgagccatctcaccagccccccccccttttttttaagggaatcaaatgtcttttattttttgtggtagtggagtttgaacctaagacttgacatgctcactaagctgcactctgagacagatctttttagaggaaaattaccacatgattattcagaaactataggcatctgtatttgcctactgagaactagtgctgaaaggatggttccactgttctcaaggcggcctcatttaaagtgcttttttgttttgattctctgttttgggaatgctcatggatgtattcacatgtaagagtccagttgtgcccagaggacccagtttgatactgagtttttttggattcttctctaccttattcattgaggcagggtttcagttgaactcagtgctagccagcttggtctaggagtctccctcttctgcctcttgtactggaattacaggtaggctgcaatgcctgtttggtgtttgcatgagtgcttagatctgaacttaagtagtatcttacttagtgtttctataactgtgaggagacaccatgaccaaagtgactcttacaaaggaaaagatttagttagggctggcttacagttcagcttatagtccattgtcaaggcaggaagctcggtggcatgcaggcagacgcggtgctagagggttaactgagagttggaagacagtgactgtgcctggcttgaaattctgacaacctcaagacccaccccccagtgacagctcttaattgtgttgctccctattggcctatggggccattttcattcaaaccacaggtagtaagtgtctcaaccactgggtcatctccctatcctatgacttttcaccttttacataggcagaacaataaacagtaatcataataattaagcttttttttttttttgaggagtgggtttgtatttattagttgttttttttttcccccagcaatatgttatgttacatgacatggtggcaactcacagtaccgtgagagtttcagtctgtagagaaaatgaaggtaagtacttctgatgagggccgaaagactaagtgaacacaaaacatcccattaaatgctcacatgtaaagcaagactgtgtgtccatgtgcatcttattctttaaattgcatttatttatttatttatttatttatttatttatttcattgtatgcatgcttaaggcatatgtgtagaggtcagaggaccacccgcggggatcacttatctttctaccacatgggtcctggtttatcagggagtaagactgaaggcatgacctggatcaagaacagttgtagaaccagcaaagtatggaagtgcaaaaagaggagtctcaagagatctgcatagctggatagatggatgttggtgttgtttacatgggatatagtaaaaggggctgagtcgttgtaggaatgagaatacttggtcttgcgcgcgccagactggccagcagtaacgacactgcaacaggatccttctgtacacgtttattgggagagcttgattgcagaggcggagagaccccgagcccagaactggtgctgcttatataggcctaggagaggcgtgtctcacaccctaattggttatgcactacgcctcatttgcatgctcctcatctgattggctactctctctctctctctctctgtacctcacagagcctcattatcatacctcatttgcatgtctcacatctgattggttatactcccaaagcctcattatcatgtccgggccaggcagtgtctttgcaaaaaagtttactgcatatgtacacattggttgtttgtccaaacttatgcatggtggccagcagtagtcagtgccactctgcaatggcacatgtggcttcccacagcttggagcatgtaaactaagatgatgacgtaaaggacagacagtagcatgctctctggaggcaggctacttgagtattccaggatatacaaatcagttttcatttttatatattctcagcattcttctcctctaccccggattgccccttcctgcccccctgccttcctggagtagattgctaaatttagcaacctcaggctccattttgttgactgtatccaagtgattacttccttcgcagtcacttgcttctctcaatagaatctcccatacttgctgccatcttacatattttggtaggattatttgattgctttgttttggaggcgtgtgcgcgtgcgtggcgtgcgtgcgtgcgtgtgtgtgtttctgtattccagggcacaggctggcctctaggtcatatatctcgttttacggctaaggatgaccttgatcctctgatcctgttctataatctctgcgataaacttgtataaacttgctgtattttaatttcaaagactaaaatgtagtgagaagggatgaggaataaatacttgcaatgaggaaagaatacctttggaaagaatatggtaaattttatgttttctttagttttggtggaattggaaaaatctgaattcatcttgcttgttcatcagaatttcctctgtggacttatgctcctattttaaggtggctgacagtcaaaattgatgcttgacaggtgtgtgatgtttagtcagcatactgtgggtgttgggtattgaacccaggtttcctgggaaaacagccagtgctcttaccggctgagccatttctttagtcttgatgctttgttaatgtatagtcctattttttaagatactccatgtgatgcaattgtggtattaaccctactgtagcagtatcttactgagagcaagagactttggataggtcatttgtttatttgctttgcttttatttcaaattaaggacagtttctaacttttttttccaaattcagaaatagaagagatcttttctacagaccttgtgccgggagacgtcatgatcattccattaaatgggacagtcatgccttgtgatgcagtacttattaatggtacttgcattgtaaatgaaagcatgttaacaggtaaatcagcaatatcatgctcattgtttatgatagcattcaaattaagtagtttataaactttttcaaaatcatgatcatttacttataaatgtggtgggtagtgatttttgtatatgtgagtagatagactacattctaggctggaaactataatcacttctgtaagttttaaattataaaactatagccacttctggtactgaccatattcctagacctgcttcttgtcactccttggacatgagggaaatggtttaataatttttggaaagaagtagactttaagctaactcagctggaaattcacaatttagaagaagtacatcttataatctgactagagattatttcctgcatggtatattttgaggcttaaagcacacaatgtcgcatgtattttctacactcttgactttgagaaagtgtgaatgctttagagaattaacctcatgcccatttctctctttgcccaaattttctgtggtatgtgtctgtatcgtctttctgtctagtggaggttaaagatataacgtcaccagatactgaaagtaacagtgcttttaaattttgttcttaaggatgtgttgcattcttactctttggaactacttgagggtcaataaaaacaattttcaaataatggcaggaatttctaaattatgaatcactttctggaattactgtggggaacaactttcccagtgaaccaattggacaaaaagttgatttattcactatgttgcccatatgtagaacagttattatatgcaatactgataattatttcaccattttttcagtatgtatttgacattgatttctaagataacctttaaaatgtgatttttcataataggagaaagtgttccagtgacaaagactaatttgccaaatccttcagtggatgtgaaaggaatgggggaggagcagtacagcccagagacacacaagcggcacactttgttttgtgggacgactgttattcagacccgtttctacactggagaacttgtgaaagccatagtagttagaacaggtaaataaaagtctctttcagatttgaaacccactagatgtttataaaggcattctggttggtggggctttataaaaagataaatacttgtctttaatttttaaaaaggatttagtacttccaaaggacagcttgttcgttctatactgtatcccaagccaactgactttaaactctatagagatgcctacttgtttctgctgtgtcttgtggtggtggctggaattggatttatctacacaatcatcaatagcatcctaaatgaggtatgtaacttttgataggtttggttcttaattatttgtcatgtggctaaagttaatattctgaagaaaactgtgacactattatctattagaaagcaaaatgtagtgggtagcataggcaggaaaattgcaagttctaggccatcctaggatggatggatggggtataaacttttttttccaagaccctgtttgaacaaaaccctgcaaagcatattctccctccctccctccctccctccctccctccctccctctctctctctctctctctttctctctcagatttatttattattatgtgtaagtacactgtagctgtcttcagacactccagaagagggagtcagatctcattatggatggttgtgagccaccatgtggttgctgggatttgaactcaggaccgtcgcaagagcagtcagtgctcttacccactgagccatctctccagcctcctcaaagcatattttcgacatagcatataatttttcagaatgtctgctgcttccctttccttaatgtgatatgaagcatgcaccaaaacctttgtgggataaagtaaaataatatatacaataataacttgttttgtttatgtagctatgttgtcttgttcctaattctacctctggggtgctggaattacaaaaactatttttaaacacttaattgaaggcacttgtaagatcatgtctgattatttttttttctagcttctgtggacacttgcccaggtgcttgtagggtgagacagtatcagatcagtacgttgatttgaaggtagtcatgtgaagaatgcacgctgttaaaatgagacaagtgctttagctcttagctctcctttagctgctagtgcattagttcattagatagctctttgaaacatctctttaagaatttccactaccctccaacactggggtttgagcctagggcctcaaacattataggcaagcatttatatgtcttttatataatctttggatgaaaaaaactatatcaataatagatgagtatatatactttttagtgaaatcagtaaattgaatattgtgagtttgatgtttatttttatgttgactgtagaaagaagttcaagaaataattattaagtctcttgatatcattacaattactgtgccacctgctcttcctgctgcaatgactgctgggattgtgtatgctcagagaagactgaaaaaagttgggattttctgtattagtccccagaggataaacatctgtggacagctgaaccttgtttgctttgacaaggtcggtttgtttcataattgctacagtgtactttttatgtttgtgctccctttatgaattaatttgccctttttaaatatttttgtctttttcctatttcttacttagttacatatcagattttgaaatatttttctcttccctctcctcccacttgaaacaagttttcactatgtagcactggctagcttcattcattcattcatctagctagaattcatttgtatagactaggctggcctcaaacagacagaaatctacctgcctctgttctccagagtgctgggattaaaggcacgttatatcatcatgcctggctcccttcttagtttttattttatttgtttgtttattagtctcttgagtgttttgcatacatgtcggtttatacaacatgtgtgttcagttcccataggttaaaagaaggggtcagattcttgaaactggagttacagggggttatgagccacggtgtaggtgttgggagttgataataggtcctgtggactagtatctctccagctcccctccccaacaacctgttcttagtgatcaatcacttgatcgttgcttacttgtccagatctgcaaatcagtgtttgtattctgtgttatgtcttaacagcaagtcagggaaacttagggctgtagttttagcatctgggaaggtgagacagaatgatagcttgagcttgcaagttctaggccctctgggcagtatggtctaaaggaaaaaaattttaatatctgttagcaataaaatttaagatatatgggtgctagagagacagttgttaagagcatttactgctcttgcagaggagctgagtctgatttatatcacccttatagcacctcacaactttctatgactacagttccagaggatctggtgcctgccctcttatggtctccatgggcaccaggcatgcccagggtgaacagatatatatgaagtcaaaacacccatacacataaaaataaagtttctaaaaattttaataaattaaagatatagtggcaataaataaaaattatatggttttggggttttttttatgtgattctgatttaatagaataggcatggatatgtatttactgtgattttatgattcataagtatatatatatctatatatatgcttatataattttattgaatcctcacaatttgttgaagaaaattggtcaatttttaaaacatgggtttgactagtagctctcttatggtgtttaaatttttttcttgtctccttatgctctaatctgttctaccattattcctcccaccactatatagagacttcctgttggttgtttggtaggtagattggctagtgcattttgtgtttgcacatgactatagttgatataggtaggtgccttcttgtatgtacttgaaggagtcctagtgtaagcactgttgtacacagtttctcattgtagtcatgtcctggaggccttgctctggcagtgtatgtggagttgttattgatttggatcttggcattttcttttttttttttgtgaggtattgtccttactttgtgcatgtgtactttttttattagactggaactcttaccgaagatggtttagatctgtggggaattcagcgagtggaaaatacccggtaaatatcaactagattttatagatcattagtttagttcatttttaatattttagcatatttaacatttaaacatagtagacaactatgtacctatcattaagagtaagcaactaatacttttctatgtatacttcagatgtctattttaaaaattgtgtgtgtgtttgcgtgtgtgcacttttagtcagagcacaacttgcagggcatgttaaaatgttggcttgtatgtagagatttatgatcctaatttaatgtgtgttttttgtttagatttcttttaccagaagacaatgtttgcagtgagatgttggtaaaatctcaatttgttgcttgtatggctacttgtcattcacttacaaaaatcgaaggtgtactttctggtgacccacttgatttgaaaatgtttgaagccattggatgggtaagttcaacctttttttaaaattatttttgatttttttaaattttatgtgcattggtgctttgcctgcatctatctatatgtgagggtgtctgatcctctggaattgggattaaagacattgtgaactgctatgtgggtacttaggaattgcacccttgtcctttggaggagcatctctgttgagccatctcttcagccccgctgtccagttttgtggtttttgtttttgatacaaggtattgtgtagcttaggcccaccataaacacagctatatatatatagccaagctatcctgctcttaactctcaaggactcaaatgagcccttacaccttacattctgtttttgtggtgctaggctgtatcttcaccagtggcttctcccagcttttttccccaaggctctagctccgacacagagccaaacctcagcttctctccctgaccccattcatgccttcaaaacaagtacccttaaatgattcaagcacattactaattttgggtgtcagcatgagatggcagccatggctatcctgaactacactctgtgctgacccagagaaataatccctgcagattttacctcagtgattctggtcttaaggcagtgttctatctgtataggcctggctgtcctggaacctgctctatagaccatgctggcctcaaattcctcctgcttctgcctcgctagtgttgggattaaaggcatgttccaccactgtggaccaccagaatttcttttaattaatgctaattcctcagccccagctgatcattatcaattgtcctagcaaaggttttccctttagtagttctggtcttttggttaatcatagctaattcttcagcaccagctaactagaaccatagattttttattattattattattatatgtaagtcttcagacactccagaagagggcgtcagatcttgttacagatggttgtgagccaccatgtggttcctgggatttgaactctggaccttcggaagagcagtcgggtgctcttacccactgagccatctctccagccccagaaccatagattcttaattcaaaactacttaataagtggttgcttctcactgaatctttacaagtcagacctccattatccatactggtctcagcattgtcttctaagttcctacagaacagcccactgcactctgagtactcagtgccttttctacctcaaagctccaaagtccttccacaatcttttacagaacttggacagctctgccacagcaataccccacaatctggtattaactttcatttttgttatggtttttatggctgcggtaaaacaccataaccaaagacacgctaggaaggaaagatttgtttcagtcagcttatatagttctacatgacaccaatcatttagaggtttttgtagcaactcaaagcgagaactttgtgagggctaaaaatgaagcagaggccatgaaagagcactgctcagcctcttattcattcattcattttttaatggtctctttacataaccctgactgtcctggaattattatgtagaccctgctgacctaaaactcagagctccatttgcctctgcttcctgagctgtggggttaagagtgagtgccactacgcctggcttcagtctgttttcttcacctgcccagggatagcatcatctgtaggagctagggctacccacatcaatcattaatcaagaaaatgtcccaagtctgatgggggcattttcttggttgagcttttcttttctcaaacctgacttaaaactgattgtaggacagtaaaatacatcccaatttctgagatgatcagatgtgggaaactgttttggaattgtttagatttaattgtataaaagtatttttttattgattgattcctccagttagtgtaattcactaattaagttttcttacataatacagacttgcttcaacctgttttgtgtttggtggtgtgtgcatgcagtatttttttttctccactcttactactttatgttgttttatgtgagggagagagggagggaggagagagagagagagagagagagagagagagagagagagcacgcgctcagaacttatgtacttgtcttggactacacatggaggacagtggacagcttttgggagctggttttcttctaccactataggaatctcaaagatcacagtcaaatagcaagcatcttcaattgctgagtcattttttctagaaaaatcaattctttgagagccggagtgatgattcagtgcttaaagagtagcagctgtgcttgcagagaactggggttcaatccccagcaggacgtggtggcttagaatcacctataaccccagtcccaggggatttcacacctctcctaacctgaatcagcatcagacacacaagtgctgtacaatatacccatatacatcaaacacagtttttaaaaagtgaaagtcaagagtttatgactatatagtagcttaactgaaatgtgattgcatggcatatctctaaaatcacatactaaaacagcttattctctacttagtggttctattaatcatatctgaattcattttatggcccgagaaaagctttcatgacacccagattgacctcaagctcactatgtacataggctgtcattaaactcctggtccttttgcttccatgtcttttgagtacacttgtgcacacacacctgtagcattcattggcagaaatcactgtattataggctaaaagtacttaaaagtaacagctatttctgttgctaggcacatgtactctttattctccttccaaattctttctcaccttacccaaaggttgccaggtatttagctatttctgttttatttatgttaaaaatttagggttgacatgtccttttatagcaattttttaatggttcacttaaaaatgaaatgagtctggaattttgtgatgtgttaagtgttttctttttatttagattctggaagaagcaactgaagaagaaacagcacttcataaccggatcatgcctactgtggttcgtccttccaaacaactgcttcctgaacctacaactgcaggaaaccaagaaatggtatagtgtcacccagtcctggagaacatagtggctgcttgtttttaattttagtttagaaatatctctagaagaagttaggtggtttttttgttgttgttgttgttgtttttgttttttaaatgcagatacaggtatttttattgaatttattaggagggtaaccctgatatgtatgctaaggcattctctgttaactgttgaaatttgattcttctgcacactagttctctcctatttatacatgtgatagttatatttctagagtgcattctgtgtttctagaattgcataaaaaggccctcttactagttttacttttaaataaaatttagtgttcccctcattttaccatttactgtgtcaatatttttatgattccagaatatttgaaatgttgaataccatttcctacctacccccaccttcctgctaggcactgaaccctttgcattctggcctggtggtcatctcgtggctgtgtgccttctttgggagttgctgtagtaacttaaatgcttaaagttgcttgttgttttctaagtgaaatttgtagatgttttagtttttctggttgatgtctattaatctgtacttttttctcttgtctttaggagctgtttgaacttccagtaagtgaagaatgctttctttttagataagtacatttgtttttattcttaaagagtaataaatcttttgtgtgcatttttgaaattaaataggctatttatgagataggaattgttcgccagtttccattttcttctgccttgcaacggatgagtgtggttgcaaggacactaggtgagaagaggatggatgcctacatgaagggggcccctgaggttgtcgccagtctctgcaaaccggaaacaggtaaggaaacatggaggctctggatacagttttgacgtcagcacgaacttacagtagcaattctaaaatttctttttattttcaaaagttccagttgattttgagaaagtgttagaagattataccaaacaaggtttccgtgtaattgctcttgcacacagaaaattggagtcaaagctgacctggcataaagtacagcatattagcaggtaaggctgagtggcttactgcatgtttcagtaatatactacttatatttatacaaaaaggtgaatgtgtgaaatgtctgcattgtacctttgttttaggtaagactaggaattttctttcattttatattgttttttcttgtttttcacatcagtttctctgtgtattcctggctctcttggaagttgttgtgtagactaggctggcctagaactcccagtgctggcatttatatcatgtgccaccacaccccaatctattgatttgttgcctatatttatgctcctgaaataattattttctttagaaatatagaagtacttagtagttattattttgatttttaaattcttcttatgtttgtctgtgggcttgtgtgtgttgacgcagtgcccatggaggccacaagtgagtgaatgagtgatccgtgaactagagtcacaggtggctgtgactgcctgatggatgtactgggaatggaatctgggacccctttcaagattggtactatgtgcccttcaccactgcgctatccctacagcctgttaccaaatttttacagtgtgtcagtcatgttctaggaataggcaacaattttgtttattttctctaaaagcccactgcccagtgggagccagatacatatttggctcatgagtatcttgagtcattatacctgctattctttctctcctctgttttattctgtcctttgtcaaatgacattactgacagcttttcttttcctgtataaataaggttttatttttatctttgctatgataaagtcctctgacaaaagaaactgaaggaagaaagggattattttaacttatagttcaagaaacagtcattatggtggagcaggcaggcagcaggagcataaagcatccagtcccagtacagttggggagcaggagagtgaatatgtgctgctgtagtgcaggatcccagccagagaatggtgccaccttcaaggggtgggtctttccgtctccacataatctacaagataatcccccggaggcatcctcctgtctcccagctaatactagatttttgtcaaattgacagttgctaccagctatcccacccttctgatttttgttgctataggtgataatgaacttacccgtttgttaatatttcatgctgtgtttagtgttttgtaagtagaaaggaatattttgtcctgctacttctgcctgatgtagagtggtgatctgaacataaataaaagccagaataagggggctggagatatggcttagaaattgagagccctgactgctttttcaggggacttgggtttccagcacctatatggtggtccacccacagactcagtattaggtgaatccaacatcttcatatgacttttatgcctgtcaggcatactaacagtcatacatgcaggtaaaacatacacatacaaaaacctagtgatgtcaagttgaaaaccacaggtatgtcctaattcccacaaaggacacattaatgtcttttctttacagtgtcacccttgttgttggccccattaaagactaactgttcacttacccgtagttcttgagcctgtcctgtatagagagctgctcatgccctggaatactgggtggatcacattatcctactctcctttttctttcttttccttcagccaagactgtctcttgtgtttttgcttaataggaatagggctttttgttttttaaaatactgatttctcttatttaaacctttacattttagaagtgtacagttctttagagtgcaagatgtccatggcatttggtgttcagcatttgtaagatcgtgagttaggaaatctgctgaacgcactggcgtggtgctgctaacctagttccacgttgttacaattgaacactgtcctttgccctttcctttccccgtaaggtctttatttatgtctttaccattttttctttttaaatagacatttatgtcaggttcatttttatttcaataaaaattaccttttgagatttacatttttggaaatagttgactgctaagtatacataggcctcattgagtatgtgcacattttactttataacaaggatgttttagatttaggtcttttagattgctctgttaatcttttgtcttaacaattacattaactcttcagagatgccattgaaaacaacatggattttatgggattgattataatgcagaacaaattgaagcaggaaacccctgcagtacttgaagatttgcataaagccaacattcgaactgtcatggtcacaggtgagcatgactgtagagctcaagttgtgtgatattgagggatggtcagctagaaaggcacattatttagtgactataccatgtgttgtactatttcttttctttctatgtcttttttgttttgtttttttgagacagggtttctttgtgagcctgttgtactatttcaactcaaaatatttccccaagataataaggtagctgtaatccagctttgacttctaacacaaactgtttctggaaaatatagtagtaaagaagaaactaaagcttttcagttatgttctttttgtttttatttcctgtaccacatgtggagccttggcttatgtgaattatctatgaatgtttcttctgctgtcatataagattcctgaggaatgagtgttagccttttttattgtggggatcacttacaatttttaacattgatgtagacatagaaaatggttatcaggtgttagaatcagatgaaaattttttcatttacatttcatttctgtactatgtatgtatgtatgcatgtatgtgtctttatatgtatgtgtggaagtcaaagactatctggcagtagtcaattcttttcctcccattccagtgccaagactcacaattccctctgaccatgttgtggaccctcgtcccaccatagcactacagtagaagcctagtgcttgttctatatgtccatgtttccctgctaaccttaatgtctttaaaataaaataaaataaaatgatgtctttaaaattaggagacaacatgttgacggctgtctctgtggccagagactgtgggatgattctacctcaggataaagttattattgctgaagcattacctccaaaggatggaaaagttgccaagatcaattggcattatacagactccctgtcacagtgtagtgaatcatcagccattgactcagaggtaatgtttatattgtctttttaagtttgctcatttgaatttagtctgggtggggggaaaagatgatacatgaaaacccagtgttaacaaaaactaaatgaaaatagaagccaggactatcattccagagactctcactcattattgtaagaatctgggtatttacattttgatacagattttccctttctttgaataaatgctaggtttttaatgacatcgtttatagtgtgaaataatcaatcttggcataaacagattgaatatagaactgcattttcttgtatgggtgcctgaatattgtttcaaatgtcttatatataggctattccaatcaaacttgcccatgatagtttagaggatcttgaggtgactcgctatcattttgcgatgaatggaaagtcattttcggtgatactggaacattttcaagatcttgttcctaaggtaagtaatgtgaatttttggatgtgttcatgagctcactgtgaacagcagcatgttaaaaaaaaacaatgtttgttttatagttgatgttgcatggtactgtgtttgctcgaatggcaccggatcagaagacacaattggtggaggcattgcagaacgtagagtaagtattgatgggcttttatggttcttttcttacgaattacaatttcactttcaaattctggatggtaactgatatttctttatatataagctaagtatccttaatccaaacacctgaaatatgaagtgctttaaaatctgaaactttttgagtgtcacagtagaaattgaagcaaatattttaaaatatgaaaaattccaaaaatctgaaacacttcaaatgaaaagtatttaaagtatgggcacatgcatgtgaatgtctgtgtgtaaagaattgttacctatcaagtatgtaagtatttttaaaataaattcactgacatatttatctgggtaatgtatccacagttctttcttaaggttgtaccctcattaattggtgctctttttaattgaaatgtatgtacatgtatgttctttgttacaaacaaacctactccccgttccctgtggtcttccttccgcttctcctccacagtcagatttattctttcttcctccttcaacctgatttcaactgatttgtccacttagtgcttgtatgtatatgggtgtataacaaagaagtgactttatcgtttgaacttcggggtttcaggccttcaactctctcacacaaatgcatttgggtcatgcgtggctttggaattttagtaactagtaatgtttgaagtttccaagggagaaatctttactcataacaccaaaaactgttcaggttcttaccttgccctccaggtaaggaagttgagacaccaaaatcatttgtccatgtgcagctccacccagtgctgtgaggagaacagcagtgtctgatgacctggtataaggaggaccacttgtttcatttgtgtgttagctctctgagtctgctggaggcgaatcaacttctttatatgtgaattgtaagaaattaaagtcttaaaatcatttttcttttcttagctactttgttgggatgtgcggtgatggtgcaaatgattgtggtgtaagtactgtttttgtgatttattttgtagttttttagcctgaatcattcactgaattaatcagtttttttttttaactgttaggctttgaagagggcacatggtggcatttccttatctgagcttgaagcttccgtggcatctccttttacttctaagacacccagtatctcctgtgtgccaaaccttatcaggtaataaagatctgaaatttttatattttttgaagagacctttttaaaaaaatatgtcttgcctgaatgaaagcatatgtactgtgtttgtgccttgtgcccaaggtgatttatcataaaagtgtttctgaacccctggaactagagttttggacacttttcaagttgccatataatataggtgctatgaatcgaaccccagatcctttggaaaagcagccagcactgttactgctcttcagccccagagaaagcaacatttccactatccccaacccccacccctttgtagcaaagctggccagaaattcactgtgtagcctggatggccttgaaattgctgggtttgtttgtttggtttttcaagacagggtttctctgtatagccctggctgtcctggaactcagtctgtagaccaggctggcctcgaactcagaaattcgcctgcctctgcctcccaagtgctggggataaaggcttggccaccactgcccaacagccttgaatttgtgatcctcctgtctgtctcgccttccagtggctgtgagtacagatgtgagagctagtattcctggctcagagttttactattttattctgtcttgtacttgactgtagtagagtgaattatcatgaagagcaacagaacttgtttaatgccaagccgtggttgagcctatgacactcttccagttgtattgcaacatacattttttgatggccgagaactttgttgtagatgtgaatggtgatgtttatctgtcaggatggatgcgtgttctgaaggacaagctaaggtgctgccagtcacattcaacattcttattcacagggaaggtcgtgctgctttaatgacgtccttctgtgtgtttaaatttatggcgttatacagcatcatccagtacttcagtgttactctcctgtattctgtgagtacccacaccacgcagacatgtacttaatggtaaagcaccaaagatagtgggcccgtgtctttgattttgaacacatgacctaaaaaggaaatttatgcagtttatataaaattaccttgaggatttgggatacatgtttcttaaagccttgcactcatggctacagctttgtgtgaaaaaaaaaatgtgttattttgtttgtttggttggttggttggtttgttgttgttcttgtttgtctgtagattggctttgcctgttctgggcaggatttcaagtttgtaatctcattatgtggttgaggagggccttgaagttctgactgctgtcacgctagggatggagcatgtgccatctgtgttacagttacaggtctagtcagctttgctatgcatttacagaaatttaaaaaaagacattttggtcataaaactatgcattcgtagaatgtagacagtagttgtgataggttactctcttacattatgattaacatgattgacctgtaatttcctgactgacactgtaacattctaaaagtatctttgtgaacacttccttttattattttcagaagtatcagaagggaagattttaaataagaagaaacactgacacttgaatactgagtattagaatgttaatttaaatattttcagtaaaaacttgttgccaaaattaaaaatgcttttgacaaattttaaagtcagaccttttatactaagatttgactttgaagttatgtaaataggttgttattggttaattccagagtcagatgttttaagtatgtttctattgctgtgatgaaacatcatgaccaaaaagcaagttcgagaggaaagggtttatttaaaggcttatacttccagatcatagcccatccctggaggtagtcaggataggaattgaagcaaggctggagtgatgcagaggccatggaggagagctgcttacttacagaattcaagcccacaagcccaggtgtgacgccatccacaataagctgggcccttcctttattgattagtaattgagaaaatgccttacagttggatgtcacagaggcattttctcaactgaggcgccttcttctctagcttgtggcaacttgacacattaaactagcaagtacataccattttgaaggtgtcattcctggggaaaaacaagactgtaatctggtaacagtgctatgaaaatactcttaaactttcacaattgcttttgtagatcttgagtaacctgggagactttcagtttctcttcattgatctggcaatcattttggtagtagtatttacaagtgagtattttgctttttttgtgtgtcagagcatacaaatgtttgaaattatattaaattttggtaaatttgcatcaaccattttatgagtaagttatattggtctagttttcctgtatatgttttattactggtttatatttttgccctatctgttttctagattggaagtggggtttatctagtgtctgtctctgtttctctgtgtctgtctgtctgtctgtctttctctctccagtttttggaatgatttacttacaccaaaagagccataaaacacttaactgcttaccttacccttcttgctcgaataattatcaggagagtatccaactcaacaattatgtatttgatcctttctgcattattttactatcttactcttaactaatgatgttatttttcttctttattgaaaatagattcccttagtccaaatcctttcccgggtctcacctgaccacttcctttcccatttccaccagtccctagaccagccttagaatctattctattttcctttcccagggagatccatgcttctccgtgcttcttcttcatagtcctcctctttacctaacctctctgagtctggattgtagcttgattattatttacttaacagctctgatctatttacaagtaaatacagaccatatttatctttctgggtctatgttgcatcacccagaatgttttttttttctagttccatccacttgcctgcaaatttcatgatgtcacttttttaaaatcgctcatatctcattgtgcaaatgtgccaaattttctttattcttcagttgagtgccatctaggttattcttagtttttagctgtggtagatcaagctacagtgaacatggttgagaaagtgtctttatggtaggatggagcatcccttgggtatatcaaaatgccaacttttattttgagactggctttctctgtagtcctggttgtcttggaacccgttctgtagatcaagctggccttgaactcagagatctgtctgcctctgcctcctaaatgctgggactaaagatgtgtgcttccaccaccctgcttgccagataattctttatagaccttgagaggacaattcttcatatggaaaaacaaaagacccaggatagccaaaacaatcctgaacaataaaggaactgttgaaggtgtcaactatttaccatccttgatgtcaggttatactacaaagctatattaacaacagctgaatgatagtgatgtacaacagacatgttggccagtgggtgatagtgcatgcctttaactcgggctatgaatttctcaaggggtattacagtgctaatgctgtatgtgcccttgtagattcttcctgtacagagaaacaagatgttagtttttactagtgttggtactagcatcaaaataaataataggcatatggcttcttcaattaataggaatttacaaatctgtccatactggaaataaatatctgggaaataagtaaaagctgttgaaagaacttgctagctaatatgaggactatttcatttgaccatgaagagatccaggtcttcttatttatattttaggaagataattctatgtggagaactatcctgtgcattgtaaggtacacagatgatccattgtttactgcatgtcttcaatactgtcaaaattccaactacttgaaatagagcccttgccatatctttcctggggtgttaaaattacctctgataagaattactgaattaaaaaaatggcttagtagactagtcaatgactaagcaaagtttatcaaaattttgtaacagttgatgatatcaaaagataaatttagaaatgttataatggaaaacttggtagatcccatgtgctatcagttggactaattttcctttgagttactgttgtgttcatagagcttcagacatgctagtatatcatttaactggggcttttttctctttcatctttatgttacattatgttatgacacaacattacatggttttgctggaattacaggtgtgcactactcccacacattgctttatagttactagttttactggtactaagattttccatgagtttcagtggaaaggtaaccgttactggaggcatttttgaaattagaattctgaaaattcgtttacttttatagattattttaaaatgtatgaaaattctcacttccaagagtatttaattatgtcttagtaagaaatttagatacaattttttgtcctttcctttcaaatatagtgagtttaaatcctgcctggaaagagcttgtggcacagagaccaccttcaggccttatatctggggcgctcctcttctccgtcttgtctcagattgtgatctccgttggatttcagtcgctgggttttttctgggtcaagcagtataaagtgtgcgatccaaattcagagtgagttggtcgatccattgtaacaattgtataaggtgactataaaaagatgagccttgaaatgtgtatagaacttgcagcttttttaaacacctcaataattttgtctttttgtcatgatgacttctgtctttaggaaagagtgtcttaattttctgttcatcagtaccacagccaagttataaggaaaagggcttcgtcttacctctggattgagaaactcatactgtcttttttgacggtagtgtttctagcagatgtttctagacatcacacattgagagacctattctgatatgctccccatttctccattattacatgaatgaattaatctacccatgggggcagaactccaatcacctcttaagttctcacccagtctctgcttttgcctctcaatgaggattaaatttgagtataaactatagaagaccatagtagaaagtatctaggcaaagaacctgaatttgcttctgagacttgcttatctctaaaatgagaaaaattagcatcagggttcaggaagaccctgatatagtataatgcttctaggttttctatttccaagttgaagaaacacttttattaaacatcattttaaaacatcctgaaagaatgttacgtatttacatatgaagtcttctactggttacaaactgtaatgaattaaataaatgtggataattttgtcaactcttcagttgtgaatattttaatttgcttgattgagattatcattaacatttttagcaaattaaaaaaaacaacatagttttcttaaatgtatataggcattgcccatgcaaaggaatggacaaaattgttttgaatcttagtgtccatttatagaggtttaacatctgtgtttgttgcagtaacattactaattatgtatgccccacagtactgtatacttagaaaaggagggcaagccctgactagcaaacattgaaggttatcttgttgtcagggcttggctacatattagcacaagtcatcctacagtataaccccagagaagtatgagccctaggtaaagaagtacagtcacatgcattaagtaagatagtgtatccccggttagcatggggtaggtagtactacattaaagacagacttgtggtctgtttacattcactctgctaaaattccaaatatgttttaaaattatttgattataattttaactgattataatctatagctgaagggtaaagaataaccttctgtgtatcctctgtgttgctgcaccttttgctatgaatagcattttacttctttgtattgtaatgatttaaggcatctaaaataacattggccccttgggaatatgctgctgtgttcttaatgggatctttgtgtgttccagtgtttgtaatacaacaagaagcgcatgttggaactcgtcacacttatacaatgggactgaactcgattcgtgtaaaatacaaaattatgaaaataccacagtattttttatctccagtttccagtacctcacagtggcggttgccttttcaaaaggaaaaccattcaggcagccttgctacaagaattgtaagtgtgacatcatgatttccacctttctcttcctttacaacattacagaaaagaaacctgatcttggcaacatgccagcaatcctacttagccacatacatagccagacccttctcaaaaacaaaacttaagggaaaaaaaaaaaaggaataagtgaatttaactggcaattctttcatggagaggcaggtgtttaatgtttggaatatttactgtcttgtcactttcatgaccattcccactcttacgtttagatgattctggttttcatagcctgttactttgggccccttttctttctttgagtgagtccagagaattgggattggaagcagggacctgtaggaggctctggggagacagtaggtgtgctttcctcttgagtgttcttcaagtatagctgccttaccccttacactgttgtcaaggtcagggtctgtagaatttctaattttaatcacttttgctccccattgcagaagtgaccaacagattagagttctgtgtctctctatgggtttcaatacaaatatccaaaattttagctttatagacaaaacttggttcgacatgtaagttgctagcttttgaaaatagaaatgggaacagtgaaatggctctgaaggccacctgtcctgccagaaaagcttgacctgagttcagtccttagaacatgtaagtaaaactgcaaaaagagactgagctacatacacacagatgcctgtgacttccacatatatccatggtgtgtgtgccagttgacacacagtaataataattttaaaaattgaaaacattagttgataatggcttttgcagtgtcatggaggaagtgacaagtgtttgtgtgtagctgtgaagaaatgtcattgttgaagtcaaatgccaggactagattttagacatcagatgagtaatactcattggaatctcattctcattctggatttgagaagcatttccacatgcatgggtcctctctgaccatatgcgcatgtgtgaacaggttaacatcgaaataggtcttactggtaatttttctgttttagatatttatgaacattcatgttactttgtaactgtaactgttacggagatctactagaagcacgccatgctgcttagaacactttataatataactaatgctaacgtactgaaaaggtgaacctttttggagggggtgagtggaggcaatattagggcttaaaccctagggactcccaccacaagctaggtacctatcattgaactatatccccaagtctcctcgctgtggtgtagcttatgtaggttaggctgtgtaactgagcttactcggagcttgtgctaggactgcagatgtttgcaatcctagcacacatgtaacactagggagctaccctgggcataacacttgctgggtaaagcactcttgcaactgagccacatccccagcccttccttacttaacttttcttctttttaattaatattatatgtggaagatagatgacaccttttggagtcagctctcttccatcttttacatgagagtcagattagactcaggtcaccaggctttgcagcaaatgcctttactcgctacttttccttagcagattttgtacttataattctcctgcctcattctcctgaattttgagattgaagatagagtgctgtgtccagaaacaatagttttcttttcttttttctctattttgattttctctatagttatgaagaaacctagccctcaggttggtatcaaattaggaaaattagctgtagtgatctaagaatacattctaccctatctatacttacactgtcgtgagtgagtgagtgagtgagtgagtgagtgagtgacacgtcaagcagggacagttgtaggggtgaactcaggaatgtacagatttccaggcaagtactctaccatagagccatacctaggtttgtttttgttttgttttggcagagctgggtttaaaagtgtgtgcccccaaccccgccaccacctttctcagttttaagctacttgttttaaaagtacatcttttacatgattgggagacttcaaatttatcttctcatttagttttcagttgattcaaataagcactttattgttgacagtggcactgatttaagtatactaaaatatttcagcagagatatcataaaaacactttatttcctgtaagctttgttcctgcagagggtatagaggaaccaatatagttggccatatatttctgctagtttctctgttttcctgttagtactatagattgccagtgaaagtcttagaacagttctttgctaaggctattcagttgttctctagatctaatcagtgtaatatattattatacttaatttgagatttttgtctgtactgttattaatatttgtcttgggtgtagaggcaatctttctagagtgatattcgcttctaaaattaaacctactatcagtgtagcttcagttttcaaccttagttgttatatatgcataattgtgtttgtgcttccatttcaagtatcatgatggttcacacttaagtctcagctatcatttctcaccagactttgcttctttgtttgaggcagggatctgtagctgaggggggcattgaccctctgatcttttacctccaaagttgtggctttgaagctgttaccactatgcctggtagtttcagttttgtcacagaaactggttggattttttggtccttgtggaatttggtttgtttgtttgtttgtaaaatccaacttctgtctttgcctgtgaagatgttattactaaatttagtggtcagagtttcgctatgtgttcctggctagcctggaactcaagatctgtccacatctggaatgctgggattaaagcatatgccaccattatctgacatatatttaaggttgaagggaatagatttaaatgtatctaataaatctggaggcggaagaggaggaggctatgcaggatgtcttatactgtaggtaataacagtatatgctttttatatttcatgaacttaaatagaggtattcaaaccaaattgtatgtttgaagtatttgtatgcttcttggtgtttggcactttttaatttaagggaaatgcctaattttattgtttgcttttcttttccagatttttttgttatatctgtgattattttgtatgttttcatattattcatcatgttgcatccagttgcctctgttgaccaggttcttgaggtaaggctaagcacttcattcattacttgtcatggttgatgggaactgggaaacagtagtaagacattgatagaaagaaagtcattattagtatcatgtggagtgtagacagctaaataaagattaaataaactacctttattttttccagtattgcttctttccctatatctaatatatagttgtatttaccaaaagacactctaaaagaatgggcatagttaaagtagattttattgattgattatacctgtgcagttcattgacccatcctttcccatgtgtcttctgtggtacatctgtgatgtatcagttcccaagtgtggactttgtgactttcatcctgttgggagctttatattttgtgttttgagttctcttttatcttttttctttggtagtatcagattgtccaaattattatgactttgttaggagtctttatgtatttcagatcaggacttatgctgcagcctcttgttgaatcatcaagatagttttatctattgggtatttctttttaaattttagattgggcttgttgggacccaggaaaagcacttagggttagagttgaaatgctcaataaattcagaatacaatcagttcccttttctgtgagcaatacctgtttttcatgttgtgttagttacttctctcgttcccatgaataactgatgaggaaagacttattttggtgcactgctgagagatactgtcttgtcagggtaggtgatgagtactagtagaagtttgaggcagttggtcacattgcattggcagtcaggaagcagagagaggctctgtgctgactgctttggacactggccaaagaagtttcttggaccaagattgagagcagccctattcagtggaaatagacatatttagaaggctcacatccatttattcaaaacagtaggattaaattccccctagggattgtgacctggccaagccatggaccaggtttacagccatcaagtttgcagtgagatctgccctatagagtaagcctgaaatctactcagagtagttggttaccccaaaacctttgtgtactaactagtacataaatctttgcattccaggtccactgctgaattttcagatcagtttcagcttgatttctttgtgttaaaattgaagtgttgtatcttcagcagttgagtcttctagctgtggtgaatgagcagtggttgtagtctgtgttggtggagggacctctagggaaatagcccacacctgacactgagaatatcatatattttatgtcttctggaggaagcagtgttcacctctgcatggtacttcattcaaacccatttttttcttaaaaacaaaacatatatatgttaaagacagttgtgaactttcatgtggggttctgggacctgaagctccaagagcagcaagtgccctcaactgctgagccatttctccagtttctgtaggttatgtatattgttaattagcttacaaagagtagatgtccataaggctattttcttagctcacccctaactccttcttcctccccatctccctacccctgctgaaacctttaaccactaatattatttcccactactttcacattacatatgttccactacctccattccctataaggcccccttcttcttcctgaccccactaaaatttgaaggtggaatccacatataagtgaaaacatgtatttgtctttctgagcctgcattgctgcacttactatagttttttccagttccatccatttttctggagatgacataattattctttatagctgagtaaattccattgtatgtatacagcacattttcattatccattcctcattttatgagcatctaggctgatttcatttcctagttattatgataacaagagcagtgactgtgtggatatccctgtgataggatataaaatccttggaagtttccaggaataagattgctgggatcatggtaatttctgttttttagctttccaaagaggctgcaccaatacatacttctccaacagtgaattaagggttcttttcccacttcctcaccagcatttgatgtcatttgttttcttgatggtagcttttctgactaggtgagatggaatctcaaagccgcttcaatttgtattttcctagtggctaatggtgttgagtgctttttaaatggtgactggcttttttttttttttccttaagaagtctttactctttttttttttatacaattttttattagatattttcttcatttacatttcaaatgctatcctgaatgctcagttcctttttgttgttaattttgttttggtttagttttgttgtttgttttggtttggtttttttttttttgtttttggtttttttggggggagctgttttctttaagtttcaagttctttgtatattctgaacatcctctgttggatgtatacttagcaaagattttctcccattctataggttgccctcttgatagacaaagttttggttttggttttaggttttgttgttgctgctgataaacaaaagatttttaatttaatgtgatcctatttgtctgctgttggtcttattttctgcctgaacagtcagagtcctattcacaaagtccttccctgtaccaatatcttaatgtatactctacttttgtttgtttgtttacatttgagagttctaggtcctatgctaaggttcttcatttatttggaattgggataaggaacttagtttaattctacattttggtctccagttttttccatcatactatgttgaaaatactatctataatccaacgagtgcttttgacatcttcatcaaaaatcaaattgcaatagtttcctaaactcttatctaggtattattctattctattttattctctttttttcaatttttcattagatattttcttcatttacatttcaaatgctatcccgaaagtcccctatactctccccctgccctgctcccttacctacccactcccacttaattggccctgtactgggtggggcatataaagtttgcaagaccaaggggcctctcttcccaatgatggccaactaggccatcttctgctacatatgcagctagagacacaagctctgggggtactactggctagttcatattgttcttccacctatagggttgcagaccccttcagctccttgggtactttctctagctcttccattgggggccctgtgttccatccaatagatgactgtgagcacccacttctgtatttgccagacactggcatagcttcatagacagctatatcagggtcctttcagcaaaatcttgctggcatatgcaatagtgtctgcgtttggtggctgattatgggatggatacccgggtggggtagtctctggatggtccatcctttcgtcatcctatcctatgctatcctatcctatccaccccagtgtctcagtagtaatggtggtggtggtggccgcagcggtgtttgtcagtaccatgctgcttttgtgactgtggctctatagtataacttgaaatcaatttggttatatctcccccagtattgtttttgttcaagattactggtctgcaaattctatggccagcagagttgattcacatgaggcaagaaggaaatccagttcaacatgactcactgtcaggtgttgactcaactaagtagtttattccaggcatatttaagtacagcacagttttggagaaaggttcctggtgataacccaatcctgtgtgtacagtaaaacttagacatagttacatcaaaagtccaagtgacctcttccataaagataggttcttgggattaactgggaaagcgggttcaagggtaaacagctcatggtaaaggtccagaagaggatagtgctatagactgaaaaaaatgaagagtcaaggagagccaggtatgacctgggcatacagttaatggaaaggtcacaggttattaaccacatccattcccagcctttggaaatacatccgttgtttaaagaaacattcctggcttccctagtacttacctgacagtacaaggacctcaggtctcctataccttttcttaatatatgatctattttaaagactgctgaaagtaatgtatttgcagtgtttggatggaatattctgtaagtgtcttttaagtccatttatctgtgatgtcatctaattctcatcttaattttgttttgtcaagaagacctgccagttggtgagtggcaggtgttggagtcacccactactatttttctgttgatctgtgacttcttatgtaatacaatttctttcctgaagtttagtgcaactgtctttaaaacccatgtttacacttgaaatgtcttcttggtatatgaaatgaccatctttaatcacttgttttggtttcaagtctatatctttgtcaggtattagaacacttgcttgtttgctaggtccatttgctcagaaactggacccacgtcctatgcaagagtagcaagtactccactgtgcggtcactctggcccctttaatggactctattgccatgacaaaatacttaaagataatcataaagaaaagagaggctttttttgtttggtttgttggctttcagttctggatgtctgagcactggaccagcatctggtcagcttttagtgcagatgccatttctcctttcagagccccaaggtgggaagacagattggcatgaatagaagagatcacataataagtatttatagtaagaaagagcaaaggaagccccccattcactcctgaacaacctgcttctcatattactaaactaccttagtacattgatccttccttgaaagaggaacccctgcgaactaattgttcatgaagacccattgcctcttagcatttcacatttaaaaagtgtgtttgagtgttttgttgtttttgttgtttccctattctgaaaattctgtgattgggatcattgggcaagtctggtttggccttccatcatctcttgcagatgcctcatcaagctgtaaggagtggtagtatgttaatgtgacacacatcaggttatctccttggcctttcacacagtgtcttaggtactccgtggtaaatacttgataactaaaatgttttaggttgtagaaagcagtcagattttggttggatgtgatggcatgtagatatatagttcagctgtttggaggcttaagtatgggaaagccagtttaagatttgaccagtattaaattagtatccagctcagtgttttaaaaaagaaagatttatttttaattgtgtatatgttaaagagatgtgcatgctgattgccatgactgtagcagccaaatgaattgattgagcattgattgaactgcaggggattagcaggtggctgcgagcaaccagactggatgctaggaactgaggtcggagcctttggaagagaagcacatgctcctaaccactgagccatctctggccgctgcctcatttttgaaagacattttattttaaaaatatagatttgttagacatttgtaatgctgtagattagagcatgcatggacttttgagtctcttaagatttaattgtcacttcaaattatgaattagaattttattgtgtgaaaagatgaatgctttgtgacattgaaagtttaatgaataaagtatacataaatacttgatatgtatgtatataaatttgctatatattatataatatatatgtcctattatattcatacatacatatgtatgtatgaatataataggatttcagtaagcttggatttgtttattgttggttttttttaaacagtctcaggtatcccagtctgactttgaacccactaggtagctgagggttgcctaagcttttaacctttctgtgtctacatgtagccatgtacttgtgccaccatgcctggcttcagagaccatggtgtaatactctaatatcaattaagatgacaacttaaactaaagtatttttgtcttctagattatgtgtgtaccataccagtggcgcatatatatgcttatcattgttcttatcaatgccttcgtgtctatcacggtggaggtaagcactcagctttgggattcttgggtgacttagtgctgagagaacaggtaatactatgtattattcagaagcccacactcacatttcatttcaggggaattcatttagcttcctgatctgatcttttctgtagttacactaagatttgatggcgttgcattcaggcatggggggtggaaagaggagcaggtatcctgaccaggcagctcccagagccgtgtgctctgaggggagagtagaggggaccactctaggaagaaagagtagtaagttctcaatgctgctctgtataccagtataagaaacaggtactgcagataaaattgtgtttaaaggtttttatagtggaagcttttgaaagaatgtgtatattttagtggtaaatctagattgagaaatcctgaaactcagctgtcctaacaaaagatggcttagatttaagttgacatatgggagcatggatgtttgtagtgtgccattttaagttgttccataggctgcattttctgttcaggggtcctaaaaagcacatctaggactgtctatcatagcactccctttcttacagtgtacatccatcttctcaaatgttagtttttattcttgttaactaaagaattacttgtatgggcactgatgaaatgtttgtatatatatatgtagatggaactaataattagatattaagtgaaaataactttaagaaaaaggctatgaatcatcaacattgttaggggagcactggagattgaatctgaattttagaaaatttagtcttttatcaagaattttgtgattttgtacttattataaaagctctgttgtttatccttttgtagtatttactgaggcttgccatgtgaaaagccaatcagtgttagtgatgtagcattgtgtgaatgttatcaaatgtgtgtgtttaaaaggaatgacctgtttaagttaattcttaactgactggaatatctctcagagcttcttccttgacacggtcctttggaaagttgtgttcaatcgagacaaacaaggagagtgtcgtttcagcaccacacagccaccacaggttggaaatgaggagttactgtcaattcttcacttacgttttggtttttccacttgtgttcttggttctgttactgtgtgcgtgtagcttcagctgtctttgttgtgcctggcatttcttcttcttctttttttttttttttttagtaagtcttaggaaaatcatggcaagcacttaatagaggctttttaggattttgggaatttcataagacttttccaaccccatttgtgtgtgtgtgtgtgttggtatgtctgttttatccttatacagagtttctttgtgttgctttggctgtcctggaatttactctatagaccaggctggccttgagctcacagaaatctgcctgcctttgtcccctgagtgggattaaaggcgtgtgacctcctagctatgagttaattcttccatttctgtctgctttatttatgtatttgattgtcactaattcccttacaggataaatgttacataaacaattttgaatcaagttttgttttttgtttttgggtttttgttttgttttgttttttaatcaaaatcaagagacacattttgacaagccgggcgtggtggcgcacgcctttaatcccagcacccgggaggcagaggcaggcggatttctgagttcgaggccagcctggtctacaaagtgagctccaggacagccagggctatacagagaaaccctgtcttgaaaaaccaaaaaaaaaaaaaagagagagagagagagacacacacattttgaggatttatttctgatttctattttcatgtatctattttgccagtcgctatgcattattttaaggtggccttttgctttccctgacaaataactctaactcagaaaattatttgtttatttctacttaagcagtggtgagggcttttaaagtcagtgaaatagcctgtgacgtacaggtaagacaaggtttctctggcaaaaggaaagagaagcaggcaaatctgttccctagtatgagaatgttacagcagagatcctgacaggatggacagattatacttagactgctgtcaatcaatcagagccctatgaaaaccttaatctcaccttgtcaggagttgtggcacacaatctcacgcatgcgaagtatctgtagaagtaccatttcatagttgaagaatagatttactgcattagaatctgtttcaaaacatgttaccagtgctctttatagagtaggtgatgtgttcaaggcttcagctatccttaagccatgtgagggattgaagaggattggctggaatttcttaagtagatcattaactcgttttcttatacctttttacctaaatggtgggttttacctaaatcctgggttttgtgttgataatggcctaagatccatgtttcatgccagacttgctgtataggatatacagtgccattttgtgctctgctctatggtagagtaatagtggcatgcattgataagcatgagcctgaagtcagttccaatttctttttcctcaaagcggtgtgatgcctgtatgttactagttagttgtgggcaagaccagaaagaactggggccgaggtccttcagctagatctcctctgtgaccaaatagctgtattttctttaggtgacttcattattgcagaaggtcacattggttcaggtcattcttctcatgtgaaatactagtattgattggaaaggcatagcctagggaaacatactgaatttttacattctccaagaagatctctaactcccagtgcaggtgtgttttaaagaggtgtttatttgcttatttagtcaaataggtcttttaagttccctataaagtatttgagttagaaatacccagattttttttttttgtttcttttttgtttgtttgtttttgatttttgagacaggatttctctggataacagctctggttgtcctagaactcactctgtagaccaggctggcctcaaagtcagaaatctgtctgcctgtctcctaaatgctgggattaaaagcatgcaccaccacactcagctcaaggaaattcccaatttttcaaccacaataaaatggcaaaaacatacatgttctttactaatgcatcttttcttaaaaagtctaggtattggttctcattcattcattcattcattcatttatttatttatttttggtttttcgagacagggtttctctgtgtagccctggctgtcctggaactcactctgtagaccaggctggcctcgaactcagaaatccgcctgcctctgcctcccgggtgctgggattaaaggcgtgcgccaccagagctcggcttggttcttaatttttatttatttatttatttgtttattataaaagtttttatttcatgtgaacttctgtctctaaaagtgttcatgggaggaaatgaacactatgctatgggaaatagtccatagcatttagaattggcatgtcccacagactggtctgttctggaaaccactaagtaaatgagaattttggcctcagttctgtggtgtttgggtttgtttgtttgtttgtttttaagatgtatttatttatttatacagcattctgcctgcatgtatgtctgcaggccagaagagggtaccagatctcattatagatggttgtgagccaccatgtggttgttgggaattgaactcaggacctccagaagagcagtccgtgctcttaacctctgagccatctctccagcccagtctgtggttttaagaaagcattttttggagctctacttttagaaaagagttctaattttagagagattagttttccttttccatcagattcttctgagtgtaatgcttgcttctctttcagtggcaactctctctagctcccttccttttcctctccctcccatcctccagcaaggaccacttggcagtgtctagagacaattttaggtatcaggttttgacacggaataggtagaggccactggtgttgctaaataaatgtacacagacaacaatccctgccaaagaattttatagcccagtgtgtctcccatcctgaagtagaaactccaggggaagggaagaagcaagggcagacagctgctgggagccttacccagggcacgtgtagtgctgactgctgcagtccttcctctgcactgccacgtcagtgttcctcagctctagagaggcccaggagagctcagactacagctccccaatcactgtgttagtgttgggagagaacacccctttcttcttttccttaccgtactcatggggaccattgatttggcttgaagatttcagagctataggctgcaatctaggctccacactaattctaggtggcttaattgggaagtcatgggagaacgagaattttgctgtgcactattaccctgttgagtatatacctcatttgtgaaaatctgtgaactgtagccattttgcagcttgaaaatctatatgaaaatactgtttcaacttactcatatagaatactaatttgggttgtatttgctttatatttagagttgatctggaagatttatgaaaaccacaatacatgcaatgcatgaaaatgtttcctaaacaactgctggttgtgaaaagctggccattagaatgtacaactaggaatgtctcagaagcaagatctttatgaacattctgtatggttctctgctgacctgtgagacaagggtctcaggaattctgtttggctacactaaccattccaaattaattaagtctaggaatccagtgttcttctgcttcggggactgaaactttgctctggggagatcccagtgttcattctaagccctgtgactaaatagccgtagtgttgcacagtgactgactctctccccttgctttcctctcccgatttctcactttgtcatacctgtagcctttagttttctcttccagtgaactgtggtattttggggggagatgtgtgtggtacatttatgtgtagtgtcaccaacctatatatagtgtatctttttgtatggagataaagaacaaacatgtttctaactatggtggagtagggggatctcaggtgttacttgtgacttaacgtataatgaatatacattgttttaaacagatgtgaaaagtacacacatacccacaaatgttggaagaatgctgtgcagttataatgccatttgtgattagctttaattatattgcttgccttagcttccagggggtatagaacagtgaatttagagggggaatgtgtgtgtctatgtcttatcccattacttttggttttctgcctgttgtatatcatctccactcaaaagattcatctgcacagacaagcatgatgtgtttctctgacgctttagcagtgctactgtaaatgaaagtgacagctttcatatttaggaacaatgatcttttccacaattggactgaagacttgaagcacaggaaaggagtacaatgcagtaactgattgttgtggtgcaagcacactcggaaggaaactgctagctttgctgtggattcttttttaaaaagaataatagcacagctgcactcccccaagtccacccccacccctacttcgatttcctttctttttttttttttttttaatgtaggatctcactgtataacactgctgactttgaactcactttgtaaactaggctagcctcaaacttgtgaagctcttcttgcctctcctgagtattagttattacaggcacattccatcgtgcatatctaaaagccttcattgtgatgataatagaggttacttggagaataatctttaaatcttctagtttccccaagattgtaattcagcttatctgtgactaccattttgcctttaaatccttgggagcaatgcagtgcagtgttctatctacaaactgaagaagaggggcagagttactgatggctgtcttactgaaatgagagaaggtccttgggggatttagttttcagagctttcattttgaagtacttttggtcctttctattgcctactctttgccttaattgatcgatggatcagctgtatgaggcagaactttcactttgtagcttaaattggcccaatgcttgctgtttagctcagtctggtggtgaacttcacaatgtcctgccttggactccccagtgctaggattgcagatgctacacatgccaggctcctgttggccaattaagaattgtgtttcaagtatacgttgtaacacatttgccttccttagccgtaggtactttggatgttcataattagaatgctcatctggtatgctgtaccttcattttgtacaattgctcctatccaggttagagtgtagtatgggctgggtcaaaattttacttgggagaagtaatagccaaaataatttatgagctgttttcagaggtgaagtatggagcaccattcctggccaaagctgtggttttcaaagatgtgatcctccccacccaccctccccaaatgtgacagtgagatcctgatcttcaccttaaggtgtttgcttcatgctttgtgttttgaaagtgatattcgcagtaacaatgacatctttcactgccctcttattaaagtgaccggtgggtatgggtaatctaagagtaatttgagatagagtaggaggatttccaaattaaatactaaaaatatcttctcagtattttctgttagagagtatatcagtacacaagacacatgcacaaaactaaaggagctgggggaaaaaaatcctctttaaaagtaatctgttcctaaattgaaagctggcttttttgcatgaagtttttcctagttatttgttgtatttagaagttatttcatattgttctgtgcacaatgcatgctttaaccaaaaaagcccttactctggtgtttttcctttcctaggagtcagtggatcggtggggaaaatgctgtttgtcctgggccctgagctgtagaaagaaaactccaaaagcaaagtacatgtacttagcacaggagctccgctttgatcctgagtggccgcctaaacctcagacaacgacggaagccaaagctgtagtaaaggagaatggatcatgtcagattatcaccatagcataacaaaggctgctctctgtgctagtagcagtgctcagcagcatgcactgttgagcttttctgacgctgtgtcagaatggcactagttcagtttatatccctctcataatatggcagttcattaaaatacaaagcagtaaaatgtcatttgctgtacgattattaactataaatctggctatttcttcatccagtaacctaaatatgatatatactttatattgggtatgagagatctgtgtttgggttttatagattttagcttttgacacgtttgcctctttaaatttacttttcataaatccccttattagaaagttcttttacatataggccccaaaattgtgattattaaaaatatagttaattgtgattagcctccagtgaaaataggttgaaagcctgttttgatccagtgttttctcccaaagaactctacgttaaacatacaccagttttcttttatgacctggagttaggagtgagtttgtgtgttgttgatagagcaactcaggtaatttccatttctggttttatattctctgtatctcctgcctgggtgtcactttctagacagtaaggcgctccactgcttgctgtctgagatatccttcatagtattccatggctcccatactgcagtctagttaagcaaagaactctcactagaaaggtttatttcagccgggtgtggtggtggtgcacgcctttaatcccagcattcgggagggaggcaggggcaggcggatttctaaattccaggacagcctgggctatacagagaaaccctgtcttgaaccccccccccccccgccacccccaaaaaaaggtttatttctgagcagccaggcatgataagtaaaggcccctagtcctgcacaggaggctgaggcaggagaattgtttagtcctggaatagatagtaaaagcctgtctcagaatacacaagcagagaaggatcggggttatgtctcttggcagtagatcccattcatacctcttcaaacctatttgttttttttcttttgggacttatatgattttaaatatttcatattctccctcccactcctactctccctccttccctctctccatcccttcctcctacctaaaggaatggaatgatgctgtttttgttttgagtttgaccttaaccttgctatgtctctcctttgaataatggggcttaaaagaataatgaacatggaatttgaattacttttacaaagcaatatgaacttgtagagcttgtcttgtgccattaggtggcaccagagatcatcacatacctattttgtaacaagtgagcttgagaaaattaagaaaatatatacatttatttagccaaaaggaatgaagaaagcatttacacatttgtgttttatctgattctgttcagttctcaaggaactttcacaatgctttcctaggtaggacctggcagtttggcagtgccttcagtttagcattgctataaaatgaaccctgaattagcgaaacagtgtaacattattctgtgttctttattagctaactacaagtgtatgctttccactctggttgatcattagttccctagtacatacttaaaagtttaccaaatgttaaccagatttttgaaacctccccccccccctatttatttattttttatgttggaaatacccgaatgatgtttggtaattgtagaaaaagtaaatgtgtctcaggatcactattactgctgttgccactagtgattcctaggaaatacataattgactttttccaacaaaatgtatattattacatgttagataataagaacaattgtcccgtgaatgattctatgaagctatgcatcttagacctcttgagctgtgaattagcactattttctatggttacttattatctattgttttatactttctatgttcatttcaaataatgttaatgttattcaatcattttctgaattgttaactcttattctttggtttaaatactgaaacatgattaattgctaactacagcttagaaacccaatatcagttgtacttaacatctttaagagcatgatcataaaggctattttgacagttcattttaacatttagagttgataagggtttatatctcatctgtccatattgtttgcaaaggaacaaggttttatgtaggtgagagaaagcatttgtacgaagttagatttgaacatagataagataggttattccagttgagaatattgttcgaagaatgtctgtgaatgcagacatgggtcctgcttagtgccataggtagactgagtcttctgtaagtcatcattacatagtaattttggttctgaattttacattaaattatttgaatatatacagacctaaattttaaaatctgtacatatattattttgatgtattaagattgataatattgctgatttaaattttatttatgcacatacttaaaggacagaaatgtctggtaaagtaattgttaaataatgatatgtagctttttaactttttaaataaataagattttttaatgtgggtctccctcagggttgtttaaagttgtttgttttcctcccttacatataaataaataatggtaaccggtttctatcttgtagcaccaactgctgtaagggaatgctgcagacagtgcttgggcgagtgtggcgccaacaagcctgagattcaaacgctttccatttaagcaaacctcttcttgtttttatacttcattttgtttcccatgttgatgaaagtactgcacagtttcaaaggcatggtaaataatgtgtttctttcatatatatttttttccaaaagcagcaaaaattcatatccagtgaagatcaacttcaagctttagagaacatctaatatctcatgcatgcagttttgttgtatcaattaaaagggttttgtatatttatggtgggaggctactgggaacttttaacaaaatagggaattaacttttgtacagtctgggcatttacatgtatttttaatgtattacaatttggtaattatgtgcacatgaaattaataaaagttacttcctgttataatttgtgaattccctgagaccgtggattttttttaagtaactttatatatcagaaatgacacatctttatatttttaaaattgtattgctgctcaagaatggtacccttttgtcaaaaaggtagatattcataattgtacattcagcattgtaaataccatatgaaatcctttttgattaaagctattcaaaataaaaaattttaatgaattaaatatgtcaatattttttcctggatccttacacacttgtttgattatgtggctacagctagctctctcagaaacagtttcactgtagatggggtttcgttgtttttgcctgggaggctggttgagaggaaggcagcttggctatttagtttgatggactggttgggggaagagctggctggctggtgcacactgcaagcagaatggcagttggggactctggggttgctgcttggtgaaaaccagagccagccagactttttgaagtaaggtccagggatccctctgcctactgtgcttagctccccttgtgaagttccagggattgaatgagtcttcatgcttacaaggcaagcattttgcttatctagctatctccccaggctctggatcttgttcttaaagtgggtgaaaagtggaaaatagtgatagaagcatatttaacgtaactctgcctcttaggtacatacaaagagatctgtacccctggatctgaatgctaagggaaacagcgtgagagcatttaaaggaattggtgggtattcccccttggagggatctacttgataatctgtgacttgacaaccaatagataatagcacttataaagaatgtctatgttatagttacatataggaaaaatgagcacagctggacattgtgatgcattctttgtgattcccaaactctaggacactaaggccagaagattgtaaatttgaagctagcatgagctacatatacatagccaagttgttgagagaaaaatagacataaaaggggaactcgagtttctcagaagctgaagaacaggtggcccttcactgtaaagaaagacatcaagtttgtcattatacagaaatgcaacgttataaagcatattgagaccataggttggtagattggtatgccattttgctctttgggctgagcctaagcctaaggaataggcatcatggaaacaatctgaatgaccaggattgaagtccaggtcagagacgtgaagaccaggagttcttacacacagtgtggcactgtggcaatacaaccacggtggtaggcagtttgacattaagttaaactgaacacgaacccttgagcaatgctattactgaacatgtttgacaatggctagaccaaccattgggggcgggcatttgagaattcattggccttatttaagaaataaaatgttgagcaaaagagatggctcatcaggtaaagatacctcccaagacatggtgtgagtccttgggaacctacgtggaggaaggtgagaaccaattgcctaaagttttctgacacccacaagtgaggcactgccacatgcacccacatactcctgcacaggaatgagttagtgcaatgtagcatggaaaaaaaccaaaagtgtggcccatgtaatgacagcctgctatttctgggaaaacttaggccctctactctctagcttttacaaaaggacttttaactatggactctgaaagtttgaaagctcttgtcattaaaacctagaatatgccctatggagatagtctttttcttgactttttatctggtaaggtctttatcttgaggatgcaagaatacttccctcttcctctctgaagtgccaagtcacaagcagagctgcaagcctttcagtcagtccagggtgcagaactgcttcaggtaaggccaaatattcttaaattagtgtatgcagttagaggctcagtctgtataggggcagaaggagacctggtacaagaaacagtacaaatttttacttgggaaacagagtaaactagtattactgtgtgcttcctgggtaactcaatgcccagagtagttttattaagcagcttggtgtataagcaaacagtagctcattatttaaatgtgtgagtcagaaaaacatcttcaaatgctacttatgtgacacttaaattaacctcatgtacactggagcgaccagcctactgcactcgtgttactgtaacagtgcaaagttcagaaaagcatggcataaagcaatgggcattatcacctgcaccactgggctccgggccgggagttacaaaacggtgtaatgagttgtggggtgttggtactttgaaaatatgtaagaaattgaatctagtggaagtgggccttgctgcggttctcttgctgactgttggggataaagctccctgcttaacttgttaaagtcagtgacacagccagtcccaggaggcgttgctttctattctctgaaaaagaccgtagcaattttaattcgttctgtaacgattttaaggtattctgtagcttgaaaatgcccaaatgtcaatgctctaaacagaaccggggagatggctgactggataaaaatgggaacctgtaagactgatctactctccaatacccacatatgctgaatagaaaagtaattttttttttaatcagcctttgtaagatagaggaagacttggttgtatctgagcgttccaaggccgtgagagtgctggcccaaaaactgtgcttgcagcagtgcgtgcagggctccaggatatgctctgagccttgtttttgctcttgcatttcagacatgctaagaagcgccctgctgtccgcggtgctcgcactcttgcgtgcccaaccttttccctgccccaaaacctgcaagtgtgtggtccgcgatgccgcgcagtgctcgggcggcagcgtggctcacatcgctgagctaggtctgcctacgaacctcacacacatcctgctcttccgaatggaccagggcatattgcggaaccacagcttcagcggcatgacagtccttcagcgcctgatgctctcagatagccacatttccgccatcgaccccggcaccttcaatgacctggtaaaactgaaaaccctcaggttgacgcgcaacaaaatctctcgtcttccacgtgcgatcctggataagatggtactcttggaacagctgttcttggaccacaatgcactaagggaccttgatcaaaacctgtttcagcaactgcgtaaccttcaggagctcggtttgaaccagaatcagctctcttttcttcctgctaaccttttctcgagcctgagagaactgaagttgttggatttatcgcgaaacaacctgacccacctgcccaagggactgcttggggctcaagttaagcttgagaaactgctgctctattcaaaccagctcacgtctgtggattcggggctgctgagcaacctgggcgccctgactgagctgcggctggagcggaatcacctccgctccgtagccccgggtgccttcgaccgcctcggaaacctgagctccttgactctatccggaaacctcctggagtctctgccgcccgcgctcttccttcacgtgagcagcgtgactcggctgactctgttcgagaaccccctggaggagctcccggacgtgttgttcggggagatggccggcctgcgggagctgtggctgaacggcacccacctgagcacgctgcccgccgctgccttccgcaacctgagcggcttgcagacgctggggctgacgcggaacccgcgcctgagcgcgctcccgcgcggcgtgttccagggcctacgggagctgcgcgtgctcgcgctgcacaccaacgccctggcggagctgcgggacgacgcgctgcgcggcctcgggcacctgcgccaggtgtcgctgcgccacaaccggctgcgggccctgccccgcacgctcttccgcaacctcagcagcctcgagagcgtgcagctagagcacaaccagctggagacgctgccaggagacgtgttcgcggctctgccccagctgacccaggtcctgctgggtcacaacccctggctctgcgactgtggcctgtggcccttcctccagtggctgcggcatcacccggacatcctgggccgagacgagcccccgcagtgccgtggcccggagccacgcgccagcctgtcgttctgggagctgctgcagggtgacccgtggtgcccggatcctcgcagcctgcctctcgaccctccaaccgaaaatgctctggaagccccggttccgtcctggctgcctaacagctggcagtcccagacgtgggcccagctggtggccaggggtgaaagtcccaataacaggctctactggggtctttatattctgcttctagtagcccaggccatcatagccgcgttcatcgtgtttgccatgattaaaatcggccagctgtttcgaacattaatcagagagaagctcttgttagaggcaatgggaaaatcgtgtaactaatgaaactgaccagagcattgtggacggggccccaaggagaatgcagtcaggatgctggcgtgccattacactatttcccaggccttttctcctctcccgtgctcttagtgtctcttcttctcccctctcttcagaagtagcttttgtaaatcgctactgctttctagcctggcctgggttacctcctctgctgttagtttcaagggggctgagggtgggggttcgacgggacttggctcatcaggtccaactgtgcagcgctgggtgcctagtggagagaggagccctttcttggtttctgaatttgaggacacatcctgccagtgggcaagacctctccgggacccagcaagggttgagtaacatttgctgaaggaacaccggcttaaaacgaaccctaggtccaagagatgaaggctcttcccaaaataaaggtggagtgttcttgtccctttacctgaaaggagaattcgtgtccgttcctctttgttgtctcattttgagtcggttctgctctggggctgttgggaaaggcagtggtctctgatacagagacgaatttcggggccagccacctctgtgctagactgagctaggacacacaggaactcctcccatccacagcccagcgacagcagccactttgcagcaccccctcctgacccgactaaaatgactgttgtcgcggaggtgggatgggaactcctgtgtgttgtagctcagctcagagggggcttgctctgaaaccgaggctcctcgggaaccagagcctggccgagggggttctagaattcatctggagaagccctgtgctggcaagcttgaggacctgctctttgtgtctgtcccactggcctcctgggagtttccatacgtcatgtttttcccatttcccataggtgacagccacatcatttcacaagcatttatggagctgtgaccatgggacaggtgttcatgactgtaatgacagcttggtttccagtggacagcgcttgtatcacgttctcatttatccttccaatagaaaacaattaaacccttgttgcagtaattggctgcctgtgcttatgagagacagtggttaaacacatgctccgggagctgacgactgagggttccgacttggtgtccccatttactaacccctgcggactctgtacacacatcctggaagcctgggtttcctcatccttgaaaagggacaaaacagtacctgcttcagagggttgttgtgagaattaaaggcaataaaacatataaagactttacccagtaccctgcatacaaaaactgctcagtgggtgatagttatcactaaagagcatgcggtttgcatcccccccctttttttgttttttgttttgtttgtttgttttggtttggttttttggttttttgagacggggtttcttcctggaactcactttgtagaccaggctggcctcgaactcagaaatccgcctgcctctgcctcccgagtgctgggattaaaggcgtgcgccaccacgccctgctcccccttgtacttttgaggctgtctctctctgcatcccaggctgggtttgaacttgagatccttctggtttactctcctgggctctaggagtattggcttgggctatcgcgttcagctggcatcatttctaaagaacttcaagatctttctccctctgtatataacagagtaaactccctcaagctggaggttatagccaaactagctgtgtctgtctacaagaagcctcagtcctgtgtgttcaggttctgtgctcgcaggtcacaggtgtggatccttccaacaccatcaagcaggaggagggagagcttgatcctggcatcagcctgtacacgcacttcttcaccaccagcttcaatacctccttggtgaagcttccaatgctcctcacattgtgcttcctccacttcctgactctcaggcacggggcaccaccctcaatctggtcctgggtataattttagagtatctgtttaattagcctcttgcgcttataaactcctcagatagtttttgtcttgttcattgcaaaagcttggagccacctatagcccaaaacctagattttatttattattattattattattattattattattattattattattatttggtgaaatgtagactcaattttagtcctattccctgaggcaggctcgaagcctgttctactcacctgtcagatgaggataacagttgtccctactagagcttcaaggatcaaatggggcaatccctgctagatagacagtgggctgatccctggggcccaaggacagctgttttgatcagctattctggaccccactgttgtaacgtttctcacggcctcttcaggccttctcatctggtaaattgattgactactttatctcaagcgcactctggtaagtaaagagtttgagcccctagtgaaacaaaatgcctacgtccgtggggttatcccctggggtcccaccagccgtgacattgcttccaaacttcaggacattcataaacttccaggaaaacgtagaggacagattcagacactttgccagcttcataaaatattcatactttactctattagattcaatatttgaacagtgtcaaaaccaactgatagtattgagaactatccttttcctctttcttgagcaataaaactactcaggaaatgtgttttgcatcctatgtggcgcagtttgaatttttactttagtgatgctaacctgaatacagtagttctcagctctgggaaacttgatgtttatacaatattctatagagtgaatatattatgacttaccactttctttttgtttatttgattttggttttgttttgagacataactttgctacatagctctggatgattttttaatgaacttttatgcttgcatcttgaagttttcctatgctctgaaagcttagagattttgagattttaaaggtccttttactttatataaggtcttaccattccctctgggatgttttggttgtttgttttctatttctgtcaaacccttgattactaattcacattttaaatcacaggcaaaacaaataaccgactttgggagttatatgcacatatgaaagagttttgggggcaagagttactttaggccactgggctaacaagctggttttgttttgagaactccatacatgagaactccatccacatcactcccttctgctccaagtcctcttgtgcctctgtgatccctcccaaatccatgacatcttgtgtgcgtgtgtgtgtgtgtgtgtgtgtgttcaacctactaagtttattaagtgttgctcatgtggacgtatccagatctgaccagtagggactggacaacctgttgtccctaaaggaaatggatgccactcccgactatctcaggagccattggccacctgtaactttgtatctaggggcagaatcttgtggggtttccctgtccctgttagcatgtcaactggtcttgttcaggtgtccaccatgttgagagttcagggatacagtttccctgtcatgtatgtctagggttttgggcttcctcttttttgtttatggagagttctgtctgtctctttaaataacttgttggtttcttgttcccctgggataggagcagaagcagctgtcatacaccagcttttgctcttcatctgacatctcacactgccttctcttcctacatggtcgaagcaacaggcagccctcagtgaagttctgtgaagaagatgacctctctcctcccacactggctgtggctcaaggctcacctaccactccggcaaccgttctgtttcataaaccttctggtgtctgaggtcctttgatgacactgccactgtctctggtgctgagcctcacgctatttcaatccccgtacatccatctgggtgcagtcctgggaaagggaggcagtggctgagagtcaggaccatctacttctcttccctacatttctagttgtggaactttccctgacttctgggaagcatgaggtctccttgtcctgggtcccttctgtgctctgtcctccatccacccccaacctcttcctgtgcttaacctaccttcttagaaccccaaaagatagggggctggacttctggtaatgctagaactgactcagtctgttctgagagaattttctctgggcttcccagcttttaaaaatcaccattcctgtcagggtgtgccacaggctgggagattccgggactctctagccaacagcccgcaccccctcattaggccctggaatgttacaggatgatccgtcaacatcataaagaaacaaacattaattgagtccagtggctggtctggagtgggaggctgacacctgtggggagaaaacaatgagcagcctccgcccagggatgccctctgcccagcttctgccccatacctgcctggtcacggtgccagtgactcctgggttttattagtcagcactgactctgatgtttctaaatccagcccttgggagagttctgtattccagggactgtgccaccaatgtgcctttagtgacattcagcatgcccttccttgtgatttcagttgtcctagcccttacaaccatccaggagttagacatcatgagccctctttaaggctaaagagccaggcagtggtggtgcatgcttttaaccccagaactcaggaggcagaggcaggtggatctctgagtttgaggccagcctggtctacagagtgagttcaaggacaacacagaggcatcatgtctcagccccctctgctccccctcccccctcaaggctgaggtctagagtggacaagagctgtcacaggatctccagtctcccagctcctgtttctcctggcatggaccacaccagctgatacaaaggcctgccagtcggggcacacgcatgctcatggtcacaaccattctgaccttgaaggctccagtccttcaagcctgagagctgagtattatctgtaggggctttggcttttggtgaagaaaaaaaaataagagaaaataggaatataaagagacaaatgggtggtgagaaggtaaagaagaacgaaggaagggagagaaaggtaggtttccggagggtgggcggctgttgacagcagctacaggctgctctctgcctagcaggagccaaagcccgaagctctccactgactcagtccctccattcttaccagggtgcgctgaggcaaacgtagtaaggagagtacaagcgtacactgaagctctgctggccagggaggagtccaccagtcaccaccagtccctactcaccaggagggcaaggttgtgtctgctctacttccccatcctagagatgggccaatgaagtgacacagagagaccaggnnnnnnnnnnnnnnnnnnnnnnnnnnnnnnnnnnnnnnnnnnnnnnnnnnnnnnnnnnnnnnnnnnnnnnnnnnnnnnnnnnnnnnnnnnnnnnnnnnnnnnnnnnnnnnnnnnnnnnnnnnnnnnnnnnnnnnnnnnnnnnnnnnnnnnnnnnnnnnnnnnnnnnnnnnnnnnnnnnnnnnnnnnnnnnnnnnnnnnnnnnnnnnnnnnnnnnnnnnnnnnnnnnnnnnnnnnnnnnnnnnnnnnnnnnnnnnnnnnnnnnnnnnnnnnnnnnnnnnnnnnnnnnnnnnnnnnnnnnnnnnnnnnnnnnnnnnnnnnnnnnnagtcccacctgcctttgcttcctgaatgct

SEQ ID NO: 3317 - DNA, 6830 bp, Mus musculus
ggccccctgcggccttttggctgcccgggccgggaggccgcggagaaggcggcacggcggcgcggctggtctgacagaagcaccctaggatcttggtgtctggatacataagagttatcttcacctgttgtgtgaagcatagcacctttcaagccactgtagaaatggacaaagaagaaaggaagactatcaacaagggtcaagaagatgaaatggagatacatggctataacttatgccgctggaagcttgccatggtttttgtaggagtgatttgtactggtggttttctcctcctcctcctctactggctgcctgagtggcgagtgaaagccacatgtgttagagctgcagttaaagactgtgaagtggtgcttctcaggacaactgatgaatttagagtatggttttgtgcaaaaattcactttcttcctgtggagaatcaaccaaatttgaatgcaaaatgtttagttaatgaggtttctaatggccatgctgttcatctgactgaagaaaatagatgcgagatgaataaatactcacagagtcagtcacaacaggttctcaacccattttacattttccagctcttcagtgttatcctgtggagcgttgatgagtactattactatgctctagccattgtgatcatgtccgtagtatccattataagttcactatattccattagaaagcaatatgttatgttacatgacatggtggcaactcacagtaccgtgagagtttcagtctgtagagaaaatgaagaaatagaagagatcttttctacagaccttgtgccgggagacgtcatgatcattccattaaatgggacagtcatgccttgtgatgcagtacttattaatggtacttgcattgtaaatgaaagcatgttaacaggagaaagtgttccagtgacaaagactaatttgccaaatccttcagtggatgtgaaaggaatgggggaggagcagtacagcccagagacacacaagcggcacactttgttttgtgggacgactgttattcagacccgtttctacactggagaacttgtgaaagccatagtagttagaacaggatttagtacttccaaaggacagcttgttcgttctatactgtatcccaagccaactgactttaaactctatagagatgcctacttgtttctgctgtgtcttgtggtggtggctggaattggatttatctacacaatcatcaatagcatcctaaatgagaaagaagttcaagaaataattattaagtctcttgatatcattacaattactgtgccacctgctcttcctgctgcaatgactgctgggattgtgtatgctcagagaagactgaaaaaagttgggattttctgtattagtccccagaggataaacatctgtggacagctgaaccttgtttgctttgacaagactggaactcttaccgaagatggtttagatctgtggggaattcagcgagtggaaaatacccgatttcttttaccagaagacaatgtttgcagtgagatgttggtaaaatctcaatttgttgcttgtatggctacttgtcattcacttacaaaaatcgaaggtgtactttctggtgacccacttgatttgaaaatgtttgaagccattggatggattctggaagaagcaactgaagaagaaacagcacttcataaccggatcatgcctactgtggttcgtccttccaaacaactgcttcctgaacctacaactgcaggaaaccaagaaatggagctgtttgaacttccagctatttatgagataggaattgttcgccagtttccattttcttctgccttgcaacggatgagtgtggttgcaaggacactaggtgagaagaggatggatgcctacatgaagggggcccctgaggttgtcgccagtctctgcaaaccggaaacagttccagttgattttgagaaagtgttagaagattataccaaacaaggtttccgtgtaattgctcttgcacacagaaaattggagtcaaagctgacctggcataaagtacagcatattagcagagatgccattgaaaacaacatggattttatgggattgattataatgcagaacaaattgaagcaggaaacccctgcagtacttgaagatttgcataaagccaacattcgaactgtcatggtcacaggagacaacatgttgacggctgtctctgtggccagagactgtgggatgattctacctcaggataaagttattattgctgaagcattacctccaaaggatggaaaagttgccaagatcaattggcattatacagactccctgtcacagtgtagtgaatcatcagccattgactcagaggctattccaatcaaacttgcccatgatagtttagaggatcttgaggtgactcgctatcattttgcgatgaatggaaagtcattttcggtgatactggaacattttcaagatcttgttcctaaggctttgaagagggcacatggtggcatttccttatctgagcttgaagcttccgtggcatctccttttacttctaagacacccagtatctcctgtgtgccaaaccttatcaggatggatgcgtgttctgaaggacaagctaaggtgctgccagtcacattcaacattcttattcacagggaaggtcgtgctgctttaatgacgtccttctgtgtgtttaaatttatggcgttatacagcatcatccagtacttcagtgttactctcctgtattctatcttgagtaacctgggagactttcagtttctcttcattgatctggcaatcattttggtagtagtatttacaatgagtttaaatcctgcctggaaagagcttgtggcacagagaccaccttcaggccttatatctggggcgctcctcttctccgtcttgtctcagattgtgatctccgttggatttcagtcgctgggttttttctgggtcaagcagtataaagtgtgcgatccaaattcagatgtttgtaatacaacaagaagcgcatgttggaactcgtcacacttatacaatgggactgaactcgattcgtgtaaaatacaaaattatgaaaataccacagtattttttatctccagtttccagtacctcacagtggcggttgccttttcaaaaggaaaaccattcaggcagccttgctacaagaattatttttttgttatatctgtgattattttgtatgttttcatattattcatcatgttgcatccagttgcctctgttgaccaggttcttgagattatgtgtgtaccataccagtggcgcatatatatgcttatcattgttcttatcaatgccttcgtgtctatcacggtggaggagtcagtggatcggtggggaaaatgctgtttgtcctgggccctgagctgtagaaagaaaactccaaaagcaaagtacatgtacttagcacaggagctccgctttgatcctgagtggccgcctaaacctcagacaacgacggaagccaaagctgtagtaaaggagaatggatcatgtcagattatcaccatagcataacaaaggctgctctctgtgctagtagcagtgctcagcagcatgcactgttgagcttttctgacgctgtgtcagaatggcactagttcagtttatatccctctcataatatggcagttcattaaaatacaaagcagtaaaatgtcatttgctgtacgattattaactataaatctggctatttcttcatccagtaacctaaatatgatatatactttatattgggtatgagagatctgtgtttgggttttatagattttagcttttgacacgtttgcctctttaaatttacttttcataaatccccttattagaaagttcttttacatataggccccaaaattgtgattattaaaaatatagttaattgtgattagcctccagtgaaaataggttgaaagcctgttttgatccagtgttttctcccaaagaactctacgttaaacatacaccagttttcttttatgacctggagttaggagtgagtttgtgtgttgttgatagagcaactcaggtaatttccatttctggttttatattctctgtatctcctgcctgggtgtcactttctagacagtaaggcgctccactgcttgctgtctgagatatccttcatagtattccatggctcccatactgcagtctagttaagcaaagaactctcactagaaaggtttatttcagccgggtgtggtggtggtgcacgcctttaatcccagcattcgggagggaggcaggggcaggcggatttctaaattccaggacagcctgggctatacagagaaaccctgtcttgaaccccccccccccccgccacccccaaaaaaaggtttatttctgagcagccaggcatgataagtaaaggcccctagtcctgcacaggaggctgaggcaggagaattgtttagtcctggaatagatagtaaaagcctgtctcagaatacacaagcagagaaggatcggggttatgtctcttggcagtagatcccattcatacctcttcaaacctatttgttttttttcttttgggacttatatgattttaaatatttcatattctccctcccactcctactctccctccttccctctctccatcccttcctcctacctaaaggaatggaatgatgctgtttttgttttgagtttgaccttaaccttgctatgtctctcctttgaataatggggcttaaaagaataatgaacatggaatttgaattacttttacaaagcaatatgaacttgtagagcttgtcttgtgccattaggtggcaccagagatcatcacatacctattttgtaacaagtgagcttgagaaaattaagaaaatatatacatttatttagccaaaaggaatgaagaaagcatttacacatttgtgttttatctgattctgttcagttctcaaggaactttcacaatgctttcctaggtaggacctggcagtttggcagtgccttcagtttagcattgctataaaatgaaccctgaattagcgaaacagtgtaacattattctgtgttctttattagctaactacaagtgtatgctttccactctggttgatcattagttccctagtacatacttaaaagtttaccaaatgttaaccagatttttgaaacctccccccccccctatttatttattttttatgttggaaatacccgaatgatgtttggtaattgtagaaaaagtaaatgtgtctcaggatcactattactgctgttgccactagtgattcctaggaaatacataattgactttttccaacaaaatgtatattattacatgttagataataagaacaattgtcccgtgaatgattctatgaagctatgcatcttagacctcttgagctgtgaattagcactattttctatggttacttattatctattgttttatactttctatgttcatttcaaataatgttaatgttattcaatcattttctgaattgttaactcttattctttggtttaaatactgaaacatgattaattgctaactacagcttagaaacccaatatcagttgtacttaacatctttaagagcatgatcataaaggctattttgacagttcattttaacatttagagttgataagggtttatatctcatctgtccatattgtttgcaaaggaacaaggttttatgtaggtgagagaaagcatttgtacgaagttagatttgaacatagataagataggttattccagttgagaatattgttcgaagaatgtctgtgaatgcagacatgggtcctgcttagtgccataggtagactgagtcttctgtaagtcatcattacatagtaattttggttctgaattttacattaaattatttgaatatatacagacctaaattttaaaatctgtacatatattattttgatgtattaagattgataatattgctgatttaaattttatttatgcacatacttaaaggacagaaatgtctggtaaagtaattgttaaataatgatatgtagctttttaactttttaaataaataagattttttaatgtgggtctccctcagggttgtttaaagttgtttgttttcctcccttacatataaataaataatggtaaccggtttctatcttgtagcaccaactgctgtaagggaatgctgcagacagtgcttgggcgagtgtggcgccaacaagcctgagattcaaacgctttccatttaagcaaacctcttcttgtttttatacttcattttgtttcccatgttgatgaaagtactgcacagtttcaaaggcatggtaaataatgtgtttctttcatatatatttttttccaaaagcagcaaaaattcatatccagtgaagatcaacttcaagctttagagaacatctaatatctcatgcatgcagttttgttgtatcaattaaaagggttttgtatatttatggtgggaggctactgggaacttttaacaaaatagggaattaacttttgtacagtctgggcatttacatgtatttttaatgtattacaatttggtaattatgtgcacatgaaattaataaaagttacttcctgttataatttgtgaattccctgagaccgtggattttttttaagtaactttatatatcagaaatgacacatctttatatttttaaaattgtattgctgctcaagaatggtacccttttgtcaaaaaggtagatattcataattgtacattcagcattgtaaataccatatgaaatcctttttgattaaagctattcaaaataaaaaattttaatgaattaaatatg

SEQ ID NO: 3318 - protein, 1138 aa, Mus musculus
QKHPRILVSGYIRVIFTCCVKHSTFQATVEMDKEERKTINKGQEDEMEIHGYNLCRWKLAMVFVGVICTGGFLLLLLYWLPEWRVKATCVRAAVKDCEVVLLRTTDEFRVWFCAKIHFLPVENQPNLNAKCLVNEVSNGHAVHLTEENRCEMNKYSQSQSQQVLNPFYIFQLFSVILWSVDEYYYYAIVIMSVVSIISSKIRKQYVMLHDMVATHSTVRVSVCRENEEIEEIFSTDLVPGDVMIIPLNGTVMPCDAVLINGTCIVNESMLTGESVPVTKTNLPNPSVDVKGMGEEQYSPETHKRHTLFCGTTVIQTRFYTGELVKAIVVRTGFSTSKGQLVRSILYPKPTDFKLYRDAYLFLLCLVVVAGIGFIYTIINSILNEKEVQEIIIKSLDIITITVPPALPAAMTAGIVYAQRRLKKVGIFCISPQRINICGQLNLVCFDKTGTLTEDGLDLWGIQRVENTRFLLPEDNVCSEMLVKSQFVACMATCHSLTKIEGVLSGDPLDLKMFEAIGWIEATEEETALHNRIMPTVVRPSKQLLPEPTTAGNQEMELFELPAIYEIGIVRQFPFSSALQRMSVVARTLGEKRMDAYMKGAPEVVASLCKPETVPVDFEKVLEDYTKQGFRVIAHRKLESKLTWHKVQHRDAIENNMDFMGLIIMQNKLKQETPAVLEDLHKANIRTVMVTGDNMLTAVSVARDCGMILPQDKVIIAEALPPKDGKVAKINWHYTDSLSQCSESSAIDSEAIPIKLAHDSLEDLEVTRYHFAMNGKSFSVIHFQDLVPKALKRAHGGISLSELEASVDFTSKTPSISCVPNLIRMDACSEGQAKVLPVTFNILIHREGRAALMTSFCVFKFMAKIIQYFSVTLKILSNLGDFQFLFIDLAIILVVVFTMSLNPAWKELVAQRPPSGLISGALLFSVLSQIVISVGFQSLGFFWVKQYKVCDPNSDVCNTTRSACWNSSHLYNGTELDSCKIQNYENTTVFFISSFQYLTVAVAFSKGKPFRQPCYKNYFFVISVIILYVFILFIMLHPVASVDQVLEIMCVPYQWRIYMLIIVLINAFVSITVEESVDRWGKCCLSWALSCRKKTPKAKYMYLAQELRFDPEWPPKPQTTTEAKAVVKENGSCQIITIA

SEQ ID NO: 3319 - DNA, 78118 bp, Homo sapiens
ttttcatcgtagatagtagtaatgttttgaaatctatctagcaatcataagagtcttaaaattcttaaccttgaatgtggaattttaaaaagttacatactttttaacaatttaggggaaagtatgaaagttttaagaacatagtagcttgaataattgaaatagaaaatctctcagtgacgtaagtggacattttgagaatgcaaactgttttattacattgcatataaatgatattttgcacatttttttttataaagagagagtaaaatgcacgtatcatttgtcagtccaaaggtaatgtccccctttttgccaaatactatacaattagacaaaactctgtaggatttctctgaataaaagggttgattttgttttttaaatagagtatatgataaaagcgataaagtacctatgcaagaattaatggtatagtgtaggctaaactcttcttcatattgatcctaatacaggtaattatgttatctttcctaattatagcttattttgttatagctatcacattgttttgtaacatacaaaaaagtataattatacaaagactccactttacaaatgtaaatacagtcttggtttggtgtatattggatacaatggtcttccttaagcctaaacacagaaacaaaagcatattataagagaaagtccaagatgggaagtgataaagtgggtattgagtagagctttgttaaaatttagctggtatccttgtaaaatttccatgtattcattaaattatattatgtcattcttatttttaggagctgacttgaagttttaagttttgccctcataaagaattgtcacaatttggttattacagttggatgattctgattttttaaaaattctttttgtatatatttgtataggtattaaaattgaaattgttcaatgactaaagttaaggctttaaacgtattggggcatattttatttcaacagcaaaaagtagaactgattttgaactggacaaggttatcttctcagttactgtaaattttacaagtttgagaataaaataatatttagaatgctagctgtgctgtttatatttcaagatcattaaagcactcttggcttgtgtggtctttaaagatgggtttatcaaatatttatttaacattggtaggtatgtgtaattctcagaaaaaaaatctaggactgcaaaacaaagcgggataattccttctctcattcaacaatacaaggtgtcacagaaatctcagtgaagttttaatttttaaaactccagaattatatatgttataaacttaaacaccattgagaaattcagttactggaatttcttttatacttatttatttttgtgagtttttttttcttttttgagacagagtctcactctgttcccaggccggagtgcagtggtgtgatctctgctcattgcaaccctccgcctcctgggttcaagcaattctcctgcctcagcctctccctagtaactaggattacagatatgcaccaccacacctgcctaatttttgtatttttagtagagatggggtttcactatgttggctggactggtctcaaactcctggcctcatgtgatcctcctgccttggcctctcaaagtgctgggattataggcgtgagccactgcacccagctgtgaattttgaatgatgcgcttttttttttttggtgtgtgtgtgtgatggagtcttgctctgtcatgctggctggagtgcagtggcgcagtcttggcttactgcaacctccacctccaggttcaaacgattctcctgcctcagcctcctaagtagccaggattacaggcgcatgctaccttgcctggctcatttttgtatttttagtagagatggggtttcaccatgctgaccacgctggtctcaaactcctgacctcaggcattccacccgcctcggtgaataatgcatttttaattttagttttttacttcagtactgctgaagatggcaaatactgactgaaggaaaaaattaaattaaaaatgtattattcaaaattgctttgcctgaacttttacttgattacaggtcgttatttaaatcacttcgtgaaattacctactttggaattgtaggcacgtacatagactatccttaaaaaaattcaacactctccacactcactattataatattgttacaactcttgagaaactcaggtttgaagcaaagatgtctttgaggtttggagatttctgtgtctgaaaacaactgatcttgttttaaggaatgaaatctgactaacttttagcatggtataggataaatagtatactttaattgtttgtagtaattacataatgtgaaaaaataagtaaactttcaaaaattggcatatttaatgtagtgagattttttttcccagtagcttcactttgtcccatactgtttttttttttttttttttaaactcacacagcaaatcaagtttattataaattcaaggaagggtttggttaagcacaatagcctataagctccttgctatttagataacatcaagactcaggcatgcactgtggaattggaacttcggtgagctaactagctaggatttattcaaataataggagctctacgagtgacagatggcagaagggcacatcttctgaaaacttactaaaaattggtgaattacaaaattctaaattttaataccttaatcattttgaaagcagttcagacagaaccgaaacagaaatatttggcataaaattccaaatttttatgcttagttttatttttattattaaaagccagcttttgaaagctgtgcaaatatcaggaattgggaagaatgatgatatagtgctactggtaagaaaaatttcttcaatttgttttctctgatatcgaatttgacttggttaaaaaacgtgtgctccagcagtccagaaaagttatatttctgtaagtaatgggtttatcaatttggtattaatgcttcaaatgtctgattagatatatagtagaattgtatttaatatgtatttttatcttgataagcagtgtattttaaatatgtttatgtggttttttatcctctcagtcattgaaataatcagggcttttacttatgtacatttaaaatttaaatatgtttttaacatacatatgttctaaatgtaagagctgttggagttgtcgcattggagttgactaaaagtttatgtgaaaagtgaattcttgggtaatttcctttgaggtgtataatatattcaaagtgaataattaattggaggtttttagagcaactttttatttgaattgtttatttttagcactttggtaaaatttgctaagacttaatttgctttaaaaaacaactacgttttagagaaattacactcataaaaagagtaatggtgtaatatggttaaaaaattgtattttgaaaagtatgaaaatagattgctataggcagtgaactgcctataataagctcatttaaaaataattaattggaagagttctttatgtggtctaactgtagaagatgaagtgaaaaatattattatgctgaactaaggtgaatgaactccttctatagatggagaaaaagttttaaatagttaaaagtacatgggcttaatgaaaacattggattttaacggcagttcctttctaaagttataaaacatgcttattcatctatttatacatacattctacattgaaaaatttggatttacaggagtgggaagtctgtaggtttgtgggaaattgatgaaagacaagggtgaagaagagtaagattcaaaaaccaacagaagtttggtgaattgagtttatggataatacctggcacatagtagattgagtcagtggacttttgagtcagtgccccagaggcagagtccttaatattcgtggccctctgtgccagaaataaatgtcttctgaaagttttcttctgtctaaaagcttcagatgggtgggaattaatttttaaattttttatttttatttttttagtgatggagtctcactgttctgcccaggctggactcaaacttttgggctcaagtggttctctcatttcagcctcctgagtagctgagactataggcatgcaccactgcacccagctgtttaatttttaattttctgaaaaccttttctattatcaacaatttctacacattaaaaagtagaaagactagtataatggactctcatgtatccattcactcagcttttaactttgctttagcagttatcaaactcatggccatcccctggtcaataaagatgggttttttaatttaaaaaattttaattttgaagtaactttaaacctacaaaaaagttggtgtatcagtgtcaagttgcttattaagttccttgattagtcttctgatacttgcagaatcttttgtggtatatctgcttattactgatactggtaatttgcatctctcctccccgttttctttcattttgatgagtcgaggtagcagttaacaattttatggatttcaaagaaccagcctttttggtttcagtgacgtttcctctttctgtttttttatttcattgatttttttctctgaattttatttccctatagcggttactctgggagtaatttgctattctttctctgcttttcttaaggtggaagctgaggtcatgacctttcttctctcagatactggaatttagtgctataaatttttttctaagtactgttttagtggcatgttacacatttcaatatatcatttttattcagttcagaatactttgtattttccactttgatgactttgacccattggtgttttaaaagtttataatttttttttttttgaggtggagcctcactgtgttgcctaggctggagtgcagtggcgtgatcttggctcactgtagcttccgcctctgggattcaagcgattctcctgcctcaccctcctgagtagctgggactacaggcatgcaccaccacccctggctaatttttgtgtgtgtgtgtgtgtgtgtgtttttagtagagatggggtttcaccatgttggccaggctggtcttgaacttttggcctcaggtgatctgcccgcaccagcctcccaaagagctgggattacaaacgtgagcctgcgcctagatttatttacttgaaaacagttgtattatttcaggtcttatgtttaagctttgttaggcagtaccagagcagtttttgtttgaggcaaattttatcccgctaactaaagcaaaaacccgaatacccttcctgattccttgtggctaatggggttttccattgtggttggtaaaaatgggtacgattcccagccttttgtgagccctggtggtttaattcccttaatcattttgggtggttctttccctggccttcggtagtttcttcacacacaagtgctgagcggtacgcagctgaaggcttgagggagtccatcttgcaggtcagtcgtgttcttagtgggtcagactctcttctggtgatctgaccagcaaacctcattgctttggtgcttccccagacttccagtttcatctcccaaactcagggaaactgctgggctccctctgagttccctgtcctccctttttttgtgacctgtaaagtgttttccatcagtaaactgggacagttgtagggcttacctagtttgtttttttaatctctcaattatcagttttcttcattgcctgatgtccagttccttgaaaaccattatgtattttgttgttgctttagggcagaagggcaaatatgatcccttttgtctcaacttggttggaagcagaagtctccatatgagaatgtgaagtaatccttccctgaggaagcatattttaggtggtggtgattggaactggagatcagaattggttatcaaaaatgaccccatgggatgtggtggctcattcctgcagtctcagcattttgggaggctgaggtgggaggattgcctgagcccaggagttctaaaccagcctgggcaacatagtgagaccctgtctctatttaaagaaaactaacaaacccaaaccaaaacagaccccggtgactactgagtgatgactacaaggttcatttttgagcccttaaggaagaatcacaggctaaaggttaagaacctcagactagtattctttagcagggacagtgtcagagcaaaaggtctttggtttatcctttgatagtaggcctgtacggtgttattactttacacattcaggtgatgatagccgatcttctctacagggaaagaggttgggcttattctcaccatagtctatagtagcaggcacagcccttgaaaataactgccacccaaaagtgctttgattttatggaacattattatggtggaataactctggtaatatgctctaggaccattacactgccctaggtggagaagatcttgttaccatgcccaaaaggttttgtgtggtcatacggcttgtttagaggaagtcggacccgatagtgtgtaaggtttctccttttccacaatggcactgagttcagtatcttactggttatttatttttgcaccaatgtttatgtattcacatatttgataagaatgtcgtagttaggagtgaaattattaaaacgacgtaagtaactgtacagacagacccttctcttttttgagatggagtctttctctgtcgcccaggctggagtgcagtgaggtgatctcagcttactacaacctccgcctcctgggttcaagcaattctctcacctcagcctcctgagtagctgggattacaggcacccgccatcatgcccggctaatttttgtatttttgtaaagatggggtttttcaccatgttggccaggctggtcttgaactcctgacctcaggtgatctgcctgccttggcctcccagagcgctgggattacaggcgtgagccaccacgctgggcagatagacccctcttattggttgctttatgatagaacaccaagaagtttcaacaatctttatgtatggggttactttaaaattctgcatttggtttttacttggctgttaatttatatcatcttaaaataaataggtattgttacttagtgcacattttttaaatcaggtcatttattcagtaagcatttttgagtgcctagcgtgtgtcaagcctgctgtgcactgggtagatgagtagaggtatgggatctgaaacgaaggcagtaatagtcctactgtgagatcagcctcatgtaaagcagtggttatcacactcggggggctgaaacccatttaccttcttgaaaatttttgtggatgctaaagagcttttatttatgtggactatagctattgataccatatatgaattaaaactgatatttcaaatatttattacaaaaataaaattatattttaagtaacatttttggaagatattttctaaaaaaacaaaaagttagaaaactggcatcgttttacatcttgcaaatttctttaatgtgtagctgaatgtttaatatttgaaatacaaaaaaaaaaaaaaaggaaaaatatgtcagtgggctcaatgaattttttccctggacaagttttgtaggtagtcaggaataatcagaaggttgcccagtggacttggaatcgaatgatggagtcagctgagtgctctccagtaggagtaaacctgccatagcgattgacttttggccagggattgccatttatgtaattggtgcttagtaaatatttattggatgattaataatctctgagaagtttttggcttggtttcattgctagtgccatagctctttactatgctacagtgaataattttgagttgtgtgaagtacttttagctcaagatggttaaactacactacttctgaatctgtggaatgaaaaaggaagactctgttagtagttcctctcaatataaattgtcctgtatcacagtagttgctagtctaaatgaattaatgaaatatgccatgttttgtggtagttaagtaatacagattcaagcactggtatcccattgaaaatgtcattagaaccagctagcactttagaaactacttaagggtcatctaaagtttgatacatcccatgagcaagtgatgaatacatcactactttggaagaattcaaatttaaacaaaatcttattaaatattaaaagaacacttcgatggtataaaacagtggtccccaacctttttggcaccagggactggtttcatggaagacagttacgggtggggagggatggtttcgggatgaaactgttcagtctcagatcatcaggcattagattctcataaggagcacgcaccctagatcccttgcacgcgcagttcacagtagggtttgtgctcctatgagaatctaatgcctctgttgatctgatgggaggtagagctggggcagtaatgcttgcttgcctgtcactcacctcctactgtgtggccctgttcctaacaggtccgtgacccaggggttggggaccccttgtataatagacagttgatagaatgcagttgtatcgtctactaagatagaagatagttccctaacgtctgttccctttcttccctcagtgatcttccattgtttgaagcactggacctttaatccactgtaggtatggacagggaagaaaggaagaccatcaatcagggtcaagaagatgaaatggtaaccagctgttctaatttactggtgatgtgtgaagactttatctctgcaatttattattttagggactagaaaaatgcaattaacaacagtggcggcagcagctaactcaatgggcttctttcttcatcctgtgcttttgaattgggattgtgtaatatgtctattagttgcttttagtataattctttttttacctgtggtctgttaaaactgagaagaagtatgtttttgcatttggtgatttaagaggtaacattggctaatataatcctaaataaaagatttaaatacaatcccaaataaagatttctaattttgacttacaaaaattttctaaaatcagcttaataaaaaaagccaacttcaacttctctactttttgttggggggagccagaaagatgtcaggtgaagtataagatgccctgttaaatgtaaaagtcacataatgaagggagaaatttttagtataaatatgtccaaatgttgcatgggacagacaaaaagattatttgaaatttaaatttaagtgggccacctgcattttcatttattaaatctggcaacgcttgttggggggctcacctgaaactatgagacagtttgtcagtggatcaaattgattagtcgcagtggtattgggacaattagtaaatcatttgggaaatagtagattaaaatctattcgtccaaatgtactgtgatactctcgattatattgtgcaacagaaataacatgttagtggaaaactagtgaaatcctaaaactgagtttagttaatagtaatacagcagtgttaatctattaattcttaacaaatgtaccaggaaatgttaaaacattaggggaaactgcacaaaggatgtacaggaacttcataatatttttgcaacttttctataaatctaaaatttatttcaaaataaaatgtttatttaaaaaaaaagcccacctcataacaagataaattcaagaagaattaaaaagatatgtaacaatgaaattgcaaacattctagggaagtgtactaaatatgaatttactatatcagtgggaaagaacgtattaggcataaattaaatataaaatcaaagtgtaaataccaacaaatttacttaaaatataactgacagtaaactggtcagaaacaaaatttaaaggtaaattatggattggaaaatatttacagtttatgtgacaagacaataaatacctatctggaaaacaaagaactttggaatgtgtttctctgccatatcattttatcatttgataattaatcatgtgatcgctgtgtccatgcaggagatttatggttacaatttgagtcgctggaagcttgccatagtttctttaggagtgatttgctctggtgggtttctcctcctcctcctctattggatgcctgagtggcgggtgaaagcgacctgtgtcagagctgcaattaaagactgtgaagtagtgctgctgaggactactgtaagtttatgtgtttacttgtagctgattatttaaggagtaaaacaatgtctttgtgtatactttattcgaaataatagatgaagggaacatcgctgcctggataaaatgaggaatgctaattctagtatttctagaggatttgtgtttgaattgactattattataatgattagagtttaaaggaatcttaaagatgatcagattcacccccttcctttcatctctcttgttgccctgagagattagctacttgtctgttacggtgctggtccattaggactgtagtccagatctcggtcactaggccagctgcctgtctgctgtgtgatgctgatgcatttcagccttttttcttttttaaaaaccctaattggaagcattttataagaggttttaatatttagtccaaatatagagactaattaaggaattactcatgatattttatgaagtattgatgtgcttatcggtaaaatatgtcataaaaaccatgagcaatggaaagcaccttatgtttgaatttaagcatcctcatgaaatggtttaatatttagtgagtaggcgtgatgtttcctcaattagagatgaggaaataatgtcttgtaaagaatggaaaataaatgaaaatataggcagttttctataaaattgactccttaccgttatccctttctctctttaaggatgaattcaaaatgtggttttgtgcaaaaattcgcgttctttctttggaaacttacccagtttcaagtccaaaatctatgtctaataagctttcaaatggccatgcagtttgtttaattgagaatcccactgaagaaaataggcacaggatcagtaaatattcacagactgaatcacaacaggtattgtgatcttaatgtcaaagtttctttaaaaatcagaattgttacattttatgctatcatgtatattctataattttgtgtttgcagttaatgcttgagataaatttacctgcatataaaatattacatattactatatataatgctatatataatcctatatatagctgttaatagaagtaacagattacatatcacaagtgattatatgctttttggtgtaacgtttatttgtgttccacagattcgttatttcacccaccatagtgtaaaatatttctggaatgataccattcacaattttgatttcttaaagtaagtatcttccttttgtttggattgtattttgaatatcctgaaaacgttctagatagaaaagagtccattctagtattcataaaattgctgaggttttattttataatttctattcacgtattaattaacaactccctgttgctgtttgaaggctcattagccattttaaaataagtcccaccgcagcttgcaccatggcagagtttacatgaaacttagagtcagtatgatgccaaagtctactgagtctgagttcttacctgtttcacctcaaagtgattttgagtatacctcatagcctgtgtctcaacttagagtatctgaatcattacctgttggtttactgacacttaaagcctgtggtacttgaggagtagagtaataggcaaagagaaatttaattttactatgtagataaagaatggggcaagctgtagtaattcctttatttttaatcgaggatttaagttatataagtacacattaagattctgtttttattgctcttaaaatgattattataaatactcattaatatcgttgctttagagtgccaaaggaattcttaattttagcggtaaaaagaaaatcatgttatgaacatttaaaatattcatacctgtaggtttctattggaagtaaaaaataaaatattcatacctggattttttactcagatacactaatgaattggaacattctggaatgggcatgggcatttttacatgcctagttttaaaaaccattcctgattaagaactattgccttaaagaaaatcaggccgggcatggtgtctcatgcctgtaattctagcattttaagaggccaaggcgggcggatcacctgaggtgaggagttcaagaccagcctggccaacacggtgaaaccccgtccctactaaaaatacaaaaaaaattagcctggtgatggatggctataatcccaaatactcaggaggttgaggcaggagaatcgctcaaacccagggggccggaggttgcagtgagctgatactgtgccactccgttccagcctgggccaaagagcgaaactgcgtctcataaaaacaaagaaaattgccaatgggctgtcattttgtttaaaaaaaaaatttttttttttttttgacttggcactggcccctgctgccttctggagaagtcatcaaattcagtgggaagaaatgtcaaacatatttactgtgtgtcttttgccagccatagaaacttaaaaatttaaacttactccattgattgaagtgaattatgaagcttagctttcctatgtggaaagtgtggaaaaggattggaattaagtatatgtaagactttctttgctttagagttatagctggtatctcagttaaaataagcataattaaggcggggggtggtggctcatgcctgtaatcccagcactttgggaggccaaggtgggcggatcacctgaggtcaagagcttgagaccattctggccaacgtggtgaaaccccttctctactaaaattacaaaaattagctaggcatggtggtgtgtgcctgtactcctaactactcaggaggctgaggcaggagaatggcttgaacccaggaggcggaggttgcagtgagccgagattgtgccactgcactccagcctggcgacagagcaaaactccatctcaaaaaaaaaaaaaaaaaaagcataattaagatattttgggaaaaagtagatgtgttagttgaagcccacttagaattattacagattttaggcattgtctgtgactcataaattctgcacttcaaaccaggtatgcatttagggaagggtttggcttgatgcttttatggagatggaagaaaatgaatagaaattcttaatttgactctaaaattgaaaaggagaaactatgtagctaaaaagtaaaatgttttcatctttggtttagaattctcaagttatactttatcttaaaattttaaagtttaattttagctattacagctttggcacagtcttaaggataatgatattattatataaatttgagtatttagagccatctcatctatcctgcaataaacatattgaatagcttcgaagttgggtttgagacttagatttgtcattgtttatcttaagaatttgagatttaaaaattctcatttgttatctcaatttttgttaagggtttctaaggatttgtaaggaagtcacacctttataaaatcaggcatatagaaaaatgaggcgttaagaaatttggatattttaaactttgtttaaagtaaaaactttggatttatttaggggactggatgaaggtgtttcttgtacgtcaatttatgaaaagcatagtgcaggactgacaaaggggatgcatgcctacaggtaatttttatccaactaaagttagatcttctcaaaattcctaaaagcagtagtatacataatcaaccctttaccatatagttgtacatattaacagatacttaaatattacagacatagtagttgagaatttattgatgttttatttgggtaagactgtcttagtttaagaattataaaaatgtgcaagctgatattttgaagttggtatccctgaaattataccatatttcatcagttcccaggtgcacgtttttccaccttttaacatctctgagattgggatgtgtcatagagttggtgaagtgtcgttcttgatagcatttttatctttcttgatcatataataatggtatgccttacaattgatagcaccttagattttctgaaatacaagcatgagttcaaattcaccgtaatgaaagattgtaaattgggagacataatctccttcattgtgttattccttgttaaatcataaaaatacaccagtgtattgcgtatgttaaagataaatgccactttgaaattcaataagaaattttcttatagttctgtaacatgttctttcaaaggggtagaacataaaattcactcatttagacttacatttcataaaagtctagaattactctatcatatagaaaatactattgtaacataaggaattaagtggaaacatttaaactttaaaagcattttcttttaaagtcgaatgtacaatgttttgaactaaacactgttagtgcaatattaaaaaaaaaataagatccctcaaatttatttggcttcttgcaaaaaataattgtaattcaaaattgttaagatctagtgtgttcaaggatgcaaaagagaaccttttgctcacatggtattatagactagtgggaaagatacttgtcacacataaagatgtgagacaaaatgaagttaagtgctaccagtataggtatctactattgacttctttgttttaaattctgtaggtagagagtttgaattatagaagacaggtgtttggagacatgaataagaacagtctgtggtttaagccttacctaatacaatgcctttcgtaaattatactattatgatataatgtaatactatgaatgtattttcctgttatagaaaactgctttatggagtaaatgaaattgctgtaaaagtgccttctgtttttaagcttctaattaaagaggtaagactattgattgtatataacttaacagtcatgatcaatggatgtgtcaatttggaatgagttgtgattaaaatattcttggttttctttttcctaacctctttttcatatttttacttggaaggtaaagacggaagacatttactctggtagagaaagaatctggggcatgtattcttaaaattttgtctagttttgcttttattacctgttgaatgtctagcagagttaggctcaccaatcttcattctggtttttggctaaagctcaagaattagttgtattaggtgaacacttttaggagtagaagtaagattgtttttcatcagttcctgggagtggccatgtaatgttgcttatgagcatagcatagtgtagtgattaggaattggaagacctgattttaatgtagttccatcagtaactagctctgatctttagtacattctctctgttgctcctttacctataaacttggaataagttttttccaattatctcatttggttttgaggtaaaatgagactatatatgaaagtgctttgaaaagtacagaagcatcaatttgaagacattgggtggggggtgtttaatgaaattgataaaataccatgacatttgggtgggtgaagttcattgccaaggtctccctttatctctttttcattcaggatttaatacttagttattatcttagagaaagcaaagtaacataacccattaactcatatttgtctttcctttgacctccagttaacttttgatatataagtaaatttgtgttttgagtttatagtaagcaaacatttttcaatttcgttaaaagttttgtattctattagcccagagcacagtaattggaaataaatgtactttattgccaaagcagattgcagaacggctaaaatcatacacttactagccttttctagctgaatctatatttggatggtatgaatctaaatggatgccagtaatttaaattaaccttatttagccaaattctagtattttaatgataataagagtatgatggcatattgccctaccttttttttttttttttgagacggagtctcgctctgtctcccaggctgcagtggcgcgatctcggctcactgcaagctctgcctcccgggttcaagccattctcctgcttcggcctcctgagtagctgggactacaggcgcctgccaccatgcccagctaacttttttgtattttttagtagagacagggtttcaccgtgttagccaggatgttttgatctcctgacctcatgatccgcccgccttggcctcccaaagtgctgggattacaggcgtgagccaccgcgcccagcctgccctactttttagggaagtacattttgccgtagaatactatggagcttatcttgtacatatttgtatctttttgtttgtcaaatgaaaagatggacaatctgtatggtcattaatacctcattcagtttgactttaaaatcttgttttttaggttctcaacccattttacattttccagctgttcagtgttatactgtggagcactgatgaatactattactatgctctagctattgtggttatgtccatagtatcaatcgtaagctcactatattccattagaaaggtaagttcaaatttattatgggtttcacaactgtatttgtattttgtagtaacatctaatgtgtgtagaatagtactcagcacaaagtaaattctcaatgcagtcattattttagttgcatgaatatatgctccttctcccctccctttttgtttgttttgctggttgggaggttggggatagcaggtgctttgtagagtcaagactctaccacttgactgtctagagaccatagggatctgtagttgctgatcacagactggaatactggaaggtactgttttcagggctatcctgttaaagtgcttcttgttttgtcttgaactaaaacaatgaatactctgaatttctgactcgacattttataaagatggagtgatatgcatttattgaattaacttatttttttagcactctggcttttttcctgaggagtgggttcatattggctagtttctaacttctttttcctctttcagcaatatgttatgttgcatgacatggtggcaactcatagtaccgtaagagtttcagtttgtagagtaaatgaaggtaagtaattgaatgttggaagaataaatcaaaaaagatacctgttaggcataatgtgtgaagtaagcccaaagtataatacatatacattctttgattgattgattgattgagtcagtgtctctgtcacttaggctggagtgcaaaggcacaatctcagcttactgcagccttgacctcccagactcaagtaatcctcccactttaggctcccgagtagctgggactacaggtgcatgccaccatgcccagctaatttttctattttttttttttttagagacagggttttgccatgttgcccagtctggtctcagacttctgggctgaagtgatctgcccacctgggcctcccaaagtgttgggattacaggtttgagccactgcactgtgcacccggcctttttttttttttttttttttttaaagtcgatgtggtctcactgttgcacaggcctgagtgcagtggctcaacttaccctcctgtctcagcctcccaagtaggtgggactacaggcttgtgccaccattcctggctaattttttctctttttttgaagaggcgaggtctcactgtgttgcccatgctggtcttgaattcctgggctcaagagatcctcctgcctcagtctcccacagtcttgagattacaggcttgagccactctgcctcgcacatacattcatttttttaagaactaaaagtatacatttcagttcctgagtttgtatcaaattcatttatttatataaaattgtatttttcttctatgtagcaggcactatgctaggctctggggattcggtgtagagataacagtagtaacagtaacaatacagtgtgacaaatgctatgataaggagaagtcagccaacttatgtattaggggagctcatttactgtaggtatcagggatgacttctttgattaagtgcttgtaagtgatgactatttgaattagccaaataagaggtaggtgagaagttgataaggggaggctgagagaaggagagaagagggttctaaatacccaaaggcctagaaattagagattgtgtggacattataagaactgaaagaagaaatttagtatgacaaatacagcaactataaatgatggatagctctctgaagcatgttagggatttgggctcagtccaaaagacagtggaaagccattgaaggctattattattaatttattttattttattttattttttcgatagagtctccttcccaggctggagtgcagtggcaatcttggctcactgcaacctccgcctcccaggttcaaggaattcttgtgcctcagcctcctgagtagccgggattagaggcatgtgccaccacgcccagccagttttttgtatttttagtagaaacagggtgttaccatgttggccaggctggtctctaactctgggtctgaagtgatccacccgccttggccttccagagtgctgggattacaggcgtacacaccatcacacccagctaatttttgtgtttttagtagaaacagtgtcaaccttgttggccaggctggtttggtactcctggcctcaagtgatctgcccgccttggcctcccagagtgctgggattactggcatgagccaccatgcatagccaccattgaagggttttaagcagaggagtgataaaatacttgccctttggaaaaaaatcattctggcgtccacattcagactggtttagaggagagtaatactgaagacatgcccccccgaatcaaggtagcaattgcggagatgaaaagaaatgagttcaaaagatacttaaatgtgaccattgaacaggatttgactcattggatatgaggccatggagcagtgtctggctaggtggatggatgttggtgctgtttagttaaataggaaactggaagagaagcaggcttgcaagaatggtaatattttggacgtgtaacttgtctggcaagatgttgaagaggtaaaggaggcagcacagcatcatgggccttggaggcagaagccgctttgatttactcagaacaccaaatcagtctccattttcttgactcagactacacccaagagattgcttccttccctgtgcttcctggccacttgctactctagctaggaagatctgcctcccttagctgaagtctaagatgtgtagcttattgatgcctctcctcttcttgttctgctgttgctgaatataatggggatgccagggcagacataccattcaacttgaatcttccttacccactttgtatagtcttacatgtcattgataccttgttttctggtacgcctaaaaggagtagaacttcaagtggtatttaaaagctttaagaaaagtcaaatttttacttttttcttcccatctgaggaatggatttattttctttttaaagaaatccaaatttttaaaagaagggatcttatttttaaaacgaagatcgataatatctactatgtactaaatgtcattctttaaaagttgttccctcataatttagtaaattacttccttttttaaaaaaaggaaagaaagagtgtttgtcttacaggctaacatcacaaacaataagtttcttctcatccatctccatttataaactagtgtgactgtcttctgagcacagtattaaacctggacagggagagggagggtgttagagaatgagaggaaaagagagagaatacctacatataaggtgaccctaaagaaaagcctttcacccttcggaagatcttttcattttcatttttctttttttcaaacaccaacttgtaccagagggaagatctttttttaaaagtgtttcactaaaatttgtaaggaaataatgagctagataaaatattacagtgtttatttaatgaatttactcatatttaaaataatatctaaaaagagtaatttaggaatattgaggcaatgagacttgaaggttataaatagtggcagtgagaaaaggaatattatagataagctgttgaaaagaaaagatgctaagttttctagtgcttccttctgtttccaagggattatagaaatcggagtttgtttgacctgtttcacaggcatctcctttgtggactcattgtgtctcttccttaggctaatagtcaccatttatcatggacggttgtcatgagtgttgaagcacacttaacctgcttcgtcagagggtacttggcatcaccggtgcacagctggtgtcctagcaggagactaactagctgacacaccgtgctttgttagcctaataatcttatttgttaaaacttgccatttgttggatttttctattttaccccattataaacttcttattgagatcagatgacttctgaatagcatttgctgtatttttccaaggtaaagaatatctttttcagatttttctttctttctttaatttcagaaatagaagaaatcttttctaccgaccttgtgccaggagatgtcatggtcattccattaaatgggacaataatgccttgtgatgctgtgcttattaatggtacctgcattgtaaacgaaagcatgttaacaggtaagctaaatgagtaaatatcaacatgagttgttcatgatatatcatgactaagttagtgagtaagccttttcaaaattagctatgtcatttgtacctttactcatgaatatgttggatattggagatttaaaattctgagtagaccgaattctgcattatactcagctgtaatactagatactgtgctatagtgttggtcacatctcttgacctcactctggctactctttggaccttaggaaatggtttaaggttagggaagtggaaaggcggccttttcccacagaaaatgtggcatacagtatttggttccccatttgatgtgtaaaaagtgggaataaagaaagattttatatttttcttgaactgaggagatacaggctttaaaatgacttccctttggaaattcacaatcttgaggtagagcttgattttttttttgttttttttttgtttgtttgttttgagacagagccttgttctgtcacccaggatggagagcagtggtgcgatcttggctcactgcagcctccgctcccaggttcaagcagctcttatgcctcagcctcccgagtagctgggactacaggtgtgtgccaccatgcatggctaatttttgcattcttagtagagacggcttcaccacgttggccaggctggtcgtgaactcctgtcctcaggtgatccatccaccttggcctcccaaagtgttggaattacaggcgtgagccactgtgcctgtccaatatcttattttaatcgtgtgaattttttttttaattgtcctagttgatctggctagaaaatgatttatatgtaatacattttgaaactgttaagagtcgtgtcttaaaacacacaaacacatatctcgtatcttaaaacacacaaacaaatacatatctgacacacatgccttctttgaagcaagaaatgtgaatgctgcagagaattaattttaaaaagaatttggctgtttgtggttgtttgagagaaccaccacattactcattttcacatctcttttttgcccagctgtcttttctgttctgtgtgtgtgtgtgtgtgtgtgtgtgtgtgtgtgtgtaggggtggatcggggtaggccctcacatctcttctgtacagtgctttccactgttaccattagttcttagaggtgcagggactatagcaactacttaatcttttttgaaattatttgaaactgaacaatgcaactgtttctaaatataaacaaatattacctttgagccacaaatcactttctggaattattgtgggagataatatttgatacttctatgtgaggaaattggtagacaaaaaattaagccatgttgtccacatatacaactctcagtgattattgtaaacagtatggtagcatttaaaatatttaacaatttaatattttttggtgttcgatactgattcctgtgctttcgtttaataatttgtaaactgtttttgttgttgttgttgttttttaaaggagaaagtgttccagtgacaaagactaatttgccaaatccttcagtggatgtgaaaggaataggagatgaattatataatccagaaacacataaacgacatactttgttttgtgggacaactgttattcagactcgtttctacactggagaactcgtcaaagccatagttgttagaacaggtaggaaacatcttaattaatctctttttgcatgtttcagcatatttgatacctactaaatgtttaaaaagagattctgggctgggtgctgtggctaacgcctgtaatcccagcactttgggaagccgaggtgggcggatcatgaggtcaggagattgagaccatcctggctaacatggtgaaaccccgtctctaccaaaattacaaaaaaattagccgggcctggtggcgggcgcctgcagtcccagctactcgggaggctgaggcaggagaatggcgtgaacccaggaggcggagcttgcagtgagtcgagatcacaccactgtactccagcctgggtgacagagcgagactctgtctcaaaaaaaaaaaaagagagattctgttttgggagataattctcattttcttataaaaatatcaataattgtcttctttttttgaaaggatttagtacttccaaaggacagcttgttcgttccatattgtatcccaaaccaactgattttaaactctacagagatgcctacttgtttctactatgtcttgtggcagttgctggcattgggtttatctacactattattaatagcattttaaatgaggtatgtatgtgggactcttaatagggtttgaacctcaattatttatcatatgcagctattgaggatttgaaatgtggctactgagaatgaggaactaaaattttaagctaatttaattttaattaatttaatgctaacaaagtcatgagactagtagctatgatattagaaagcccagctatagaacatttccattgtaaaggatacttcttttgggtgcctctggtttagatggtcttttacttggtcttgtgactttaaaaaaaaaaaacaggaaaaaaaacccccccacataatcaccaaaagctttattttctcttttttacctctgagatgtaatatacagtgttaaaatgatttgtggttagttaattgaaggcgccgcttgtcagaagtggagagtggtacagtaaggtgtgtgcacgctgagtcaatatctgataatgattgttgaccggctttgaagtgtgtcatgtgtgaagtatgtagcgccttgaaaatgagataagtttcttttgaaagtagctgtcattctataatccattgagcttttttattttgcagaaatatctgaagaaaaaaattatatatggttaatagatatgtatatacacacacatacataaaattgaaatatacaattgaaaatggcttacagattttcactaaagaaatacccatattaaatccgtaaataatactggggatttgacatttatttttgtgttaattgtaggtacaagttggggtcataattatcgagtctcttgatattatcacaattactgtgccccctgcacttcctgctgcaatgactgctggtattgtgtatgctcagagaagactgaaaaaaatcggtattttctgtatcagtcctcaaagaataaatatttgtggacagctcaatcttgtttgctttgacaaggtgggttcagtttcatagttactttcaaaggttacttcgtagcgtttaaatatttagatcaatgttttttattttctttgtcaacaaatttggacacattctgtcatgttcctctaattttccttttcctccacttatttggtatatgcatcatttttctataccataagttctcacttaacattactgataggttcttgaaaactgcaactttaaatgaaatgaaaccagttttaccataggctaattgatacaaatgagatttaagttcctatgccatattttggtcacaaaaaatcaccaaacttctaaataaagatctaaaacacttctgatattaatcattgaaataaatatgagctatacattcatttaagaaagaaataaaaacaagtaaggtaattatttacccagttgttttatttcaggctcctgggtagtgggagcgtatctcagcaactggcggaacgaggcaggaaccagccctagacaggatgccatcgtatcgcagggtgtactcacactcgcgcagactgggaccatttaaatgtgctggttcacttaacttgcgtagctttgatgtgggaggaaactgaagtacctggagtgaaacccatgcagacagggagagaacatgcaaactccatgtagatagtggtcgcggctgggcctcagctctccccaccactggcacccatcgtgttataaaaaaagacggacaaaacaatcgtatttgaggacatgctatatttcttattttctcaatttttaatactttggatattgcttatttgctcaaagcttcagttaactccagaattaggcctagtagtattaatagtagtagcagtaaagattacgtgacctttaattttttagacagtaattcttatttaacacaataggctccatacatatatatttattatgattttattgcttgtaagtgtgtatgtttagtgtttgctgtatgattttattgaatatgtttaagaattatgaaggtcactgattttatgtgaaaatgacaaattatgtacctgtgtgaagtatatcttgcctcttagaaaggtttctcctttcctgagctggaattttctttaaagttttctgagaattaaactttgaccagaaaaccttctatcaaacttttctgggtaactgatgtgatacaaatttgatttttgtgcatttcattattacagaaaaaaatgggaaacatgttctgttagaaaaaaatatgtcacatactgctacaattatttcatatttatcagttcaaaaaatttcacttatgcttgtcttttttggaaactttcctaaaagttttaagacaaaagtggagaaaagatgtgtgtataataaacactcatttactcattacccagctttatcagttatcaacacattgtcagtcttattttatctatctgctcattttgaaggggacagcatcagacattatttcactcataactaccttagtatgtgtctagaggatatttaaaatatcactatcacatttaacagaattagcaattctttagtttttctaatatccagttgagatttcctcatatctctaatttttactagttgatttttcagtcagaatccaaatagggattacattgcttacaattaacatgtaacaattgcctttacttaccccttatctccagttattttgttgaagaaaccaggtcatttaccttgtggatttggccagttgcttcctcctgatgtactttaacctgttcctcttggccctccttatacagtaatccttccttttttgctttataggcatcctttattgattgataagataggttaactggtgcatccttccattgattttttttttgatagtataagcacgtaaatatatacccctctctgcccttacgcagaagatttgtgatcattgtttgcaccccctctcccactttaaccatatgtcctggaagccattctctgtcagggatcttgcctgtttctttttttaactctgtagaactccattatgttatatgtagcatagtttctaatgctgtgtggttgctttttatttttatttttgggtttttttttgaggcatcatccatactttgtgcatgtgtgcttttttgttttttagactggaactctaactgaagatggtttagatctttgggggattcaacgagtggaaaatgcacggtaaatattagttagacttgatagtttattagtttatttttaatattttaacatgtgcaacattcaaacataaaggaagtaatagacaactgtgtacctataccaggattaaaccgtggacatgttgccatatttgcttcagatcgcttcctttagaatattaaaatattatagaagttgccaaagtcccactgtatcccttccccaattcctactgccattctgaaattatttttgcatattttatattttttctaagtataaatctataaataagtatccatgaatgatatactgtacatatgttttgctgcttttttcccctctccaaactttgttttcaagatttatccatgttgatatgtgcagatctagtttattaattttaactgctctgtcttattccattgaatgattaaaccttgtctgttcttctactaagggacaattctgttttttcttcttttttctctgcactgttgcaaatagtgctggaattaaagttcttacacataagtccttgtaggcatgtggctgagtttcagtaagctagatccctgtaaatggaaaggctgggccgtagcatgggcacggcttcagctttatgctttctctctcagtgggtaaagatctttttactccacattcttgccaaacttaatattgtcagacttgtaatttttgccagatggatggatatgagtattacattgtggtttttacattcttctcatttcttataaaattgagcatcttttcacattttggagggagggtcatttagcattcttctgtgtattgtgtgtttatatcctcatttttctgttgggaagtctatcttatttgttagaggtcttttttattttctggataggaatctttttcaatattgtgtattgaaaattatcctattagtctctggctcatctctttacttttgtttctgttgctttttgaagctcagaagttttactcctgtagttttgtttgtgtcttcccccctccccctgtcaaaagtctgctaaattttggtgtatatagcttgagagacagtattgtttggccaatgtaatttcaagagttgttgtgtcttggaaaatagtatgtcacgttgtgacctttcttatctctagtaatgcatgttgccttaaattctgttttgtcttataattatatagctctataccagctttcttttgcctgatgtttgcctagtgtgtgttttgccacttgtttacttttcagtctttctgtgccatgatgtgcacatttattcagatatattagaaattatttctaccattgctcccccaatttacatacacattttcacattctcattttttctctcattttctcactttatgcatcccaatcttatactgcttgttcttacattatcaatatttatacttaaagttcatggatgttaatactgccttttaaccactcccctgccccccaaaacaaacctatggactgtaagatacttttggttattctcctcccttcctatatgtatttgttgcataatattttctgattattattttggtcttatacagtctgcatgcttagatttacctaggtgtactaatgccttaaccattgcatcttgtgtaaattgccatcttctgtaactacattcatttgctttgtttcactgtcactcttttttttttttttaagtgaaagcaaatttaagaaagtaaaggaataaagaatggttccttcataggcagagcagcccactgtcacttgggtggtagtgtaactatacagatttctaggtttgacatttgtgttctctcaatactatgaagctgttatttcatttctcttaataccttttgttaattggtactgataaatcttagtctttttagtaatcttttttttctctggttgcttgaagaatatttcttcacccttaatttctgcagattcactgtgatctttttatttgtgtgtacaggattcatgatgcttcttgatttcatgctttcatgtttttcataaattctggaaaattttcaggccttttttacttccattatggccttttccttgtgttttgttttctctccttctgggaatcctaaccatgtgttggacaacacatggtttacttggttctttccaagtctgctcccacccctactctcgcatctacagtgtcttactctttgtatgtctaattttaaaatgccctttttgcattctttcagatttgccattctgttatcttaaatttacgggattctttatttttttattttaaacataggaattggtatgggtgtctcgctatatttcccaggctggttttgaactcctggcctcaaatgatcctcctgcctcagcctcccaaaatgccgggatgacaggcatcagccactgcccctggccaaatttataggattctaattctgtctttgttatgtctgttgacactcttggtgaattgtttgctagcgcatctttaaattatggactcattcttaacagaattttctttgagctcccctctggagaagttctgactttgcttggctaagagccccagtggtaatcaacggtgtcatacaggctttaactgacctcctgtgtttcaatccttgctctgctacttatggacggtgtaacctgggacaagtcacttaaccaccctgcttcagttttctcatctataatgggggtaataaaacaccttttctatggtgtgaggataatgggccaataaatttaaagttcttagaataatgcctggtgcatagtaaatattatgcagatattagctattttcttggactttgggtgaggaaaaagacaagcttattcataattaatgcctttaggtctgtgggtgaattttttctcatctgcccttttcccaagggcgtgtagctcttcaagagtactggctttcctgagtcagagggatcctttcagtaccagctacccactttgcatggggccagactttgtttcctgtccttttgtgggtattaaatcccaagttcttagtttactgagatggccccctcccttcatccccccagcagccatagcatcagctcaagttcacacccctctggttttcttttccctgtatttctgacacttgacagtttctctttcttaggagctcagattgggatttaaaagattttttttttaattacaaaaccagaaaagccctgttagaatattatcttgaatcttagaatttatgaaactaattcagtgtgtcttctgcttagatttctttcaccagaagaaaatgtgtgcaatgagatgttggtaaaatcccagtttgttgcttgtatggctacttgtcattcacttacaaaaattgaaggagtgctctctggtgatccacttgatctgaaaatgtttgaggctattggatgggtaagtcaaatattttaaaatacaaataactttaggaaaataatagttaaaaattaaattacctcatacaaggattatttctgctttttgttttaatgacagtctatcttgtaccctaaaaggagctatgtaatttctaaagctacatcaactggagaaatattttaaaaatcatgcaaaagtaacttttagttaacccatttagtacacctttaatagaggctgaccagctcaggcccctgctttgtgtttaaggtaaaccaggggtcagcaacttggggagggtagagcagagccagtaagatgatctcaactgacacaatttcttggccacaggcaaaggtgtataaagtcgtttgtcttcattgctcttttttacctgtcttttgtttactgtgtccacatacatgcacatgtttttgtttgtttataacttccttctatttttgccattgggacttttaatttctaagtgcctgcttacgttctctggttgttatcattttacagcattcagttcttcttttataaatacaaagtcagttcattttagagttcccttctggcttctgaattatttattttctttgaggttatggtctcctctggcccccaccccatggctggtgtctctccttcatgctcttggttttcattgtacatctggatggcacttttttactctaaaaatgaagatctgatttggtaattctgcatagctgcagtgagctacttcaaattttacccttgcccatatgtatgttagtgtttctgatcgtgaaggcttgttgggggatgggggatggtgcttgctctgtgtctggtggggtcttatcgacaggggttcttaaagtttcaaaggaatagtttcagagttagcctctccgttgctttcctcacccattctcaccatgcttgcacatgtggagctctgtactctggaatcctcaccctcatgtcagcagcctttgctctgtcagacattcagtttatgtctctggaggaggactccctggttttttgtttggctttctttagctcagctactctggctgataagtgttcctgcctcacctggtatcttgtgtttgttctgggctactgtttcgttcccgtttgtatccatccataggtttcagtttgccctttgtttccatatttgaaatcccttccttcaggtttgttttctgtttacatttacaggatcctcccttccctcttccctgcctccccacctccctccctccctacccacattttgaaagggagagagggaggaggtgactggataagtgctccatctgccaactactgaaagtccatggtaaacactcttgaagtttaattctgaaaaggaggcctcacttcatttatagagagaataacaaaaatgggctgatttatcgttcttctctaagcttttctccaactgaatagattttcagtagatttagtgttcagtgttggtgtatcttcaaagaaattaagaaaatgtgtataatggcatatttcattggccctgagttgctttgatgcttgatcccaccagagcttacttatccgtgaaatggtttcacatagccagtcacaactgtgacttgatgtgattggtgtcatatgatacaagatgcagatgtcatatgatacaagatgcatcccagttttagagatgttaagatacgaaaaaaggtgtcttagaattgtacaaaattggctaatttttcacagttccctattgttttctcatttattgatcccactaattatagtgtgtgtttaatatacgtttttcttcgaatgtttttcaccaaaaaaggttctttaaagtattagcttaactggaagtattcaagctgagaaactctaaactcatatctttgtgctttagcctgttcttgacccagcggttctgctaaccatatctgagctctatgtacttttgaatcctttcttggtagcagaaaggaatcactggatgagcctgaaaattctggggactacaagaaccttttatcttttgcagagctagtctctaaacccaacaagttgtaagagtgaagtgagatcagtttctatttctttattctgcttctaaccctgaatgaagcaacccttctcccatgggttgctaggtatctaactcaccatctttgttcatattttcttttacttatgttagtgatccagtagtgctcatttgttccttggacatacattttttttaattattgaaaatggccataatgttctatttaaaaatggaaccatgaattcagttttatgaagcagtgcttgaatgttgtgtttttgtttttttttgtctcttttttttttccagattctggaagaagcaactgaagaagaaacagcacttcataatcgaattatgcccacagtggttcgtcctcccaaacaactgcttcctgaatctacccctgcaggaaaccaagaaatggtgagaaatcacttaaagctagataaaactgttggtggttacttatatttatttttaatttttttcaatttttattttttatagagacaaggtcttgctatgttgcccaggctggtctcaaactcctgggctcaaatgatccccctcaaccttggcctccccaagtgctgggattacaggtgtgagccaccacccccagcctgcttacttacatttaattctcattttgaaatgttgctagaagaggaagtcacaagtcctttatttaactcttatgcagagataggaatattttaactgcgtttatcagaaactacacctctgtgttgagatataattctcagtactatcacttttctttcctgtttactgagcagcttagtgccttgtgatttatacagctggtggttaatcctcttaaattgcatctgtattcctagaatttaataaaaagtatgtatgaaaggctttacttttaggtgaatttttaaatatattccccttagtttattattactattttttaagttacctgaaattttttttacatgtataagtattacatatccaagaaatttaccaagattctaataaacaccactttatcttatttgtataactggttggcaagattctgggtaattcattttccttcctgtttatatttgttctttccagagtttattattattttttgagctggagtctcgctctgtcaccccggctggagtgcagtagtgagatctcagctcactgcaacctctgcctcctgcgttcaagtgattctcctgcctcagcctcctgaggagctggtattacaggcgcacgccaccacacccggctaatttttgtatttttagtagagatggggtttcaccatgttgataagtctggtctcgatctcctgccctcaagtgatccacctgccttggcctcccaaagtgctgggattacaggggtgagccactgcgcccagccagcctattattttttaatttttattttgtgttttttggtatgtacacttgcttgcaccccttagtttattttagtacttaaaatgttaatattttcaggatagcagaacatttgaaaatatttaagaacatactttttaaaaatgggaagtagtatagaaggaatcttgaatcctgactttgaaaaacagttgcttgtttcttttccaaataatgttttgtggatgcttagtaaactttttctaactttagtgtgttaatagagttaatctgtactattttttcttgttttgtttcgtttttaggagctgtttgaacttccagtaagtgaagaatgtttacttcttactaagtatatttgttttgattctttaagaatattaagtgctttgtgcctcttttgaaatgatataggctacttatgagataggaattgttcgccagttcccattttcttctgctttgcaacgtatgagtgtggttgccagggtgctgggggataggaaaatggacgcctacatgaaaggagcgcccgaggccattgccggtctctgtaaacctgaaacaggtaaggaaatatctatgctttgggtacaattctggtatttgagtaaacttgtattagcaactctaacaatgaaatttactctttcttttaaaaagttcctgtcgattttcaaaacgttttggaagacttcactaaacagggcttccgtgtgattgctcttgcacacagaaaattggagtcaaaactgacatggcataaagtacagaatattagcaggtgaggttgaacggctttcctagtttcccagtcatcatcatttatggttatattagtcatgcacagtaatttgcatgtaattgagtatttattgaatgtatgaaaagatatctaatataatattgttttaggtgattgaagtaaaagtacattttccccactgcctgatttcctttcattctgggtttttttttgagagacagtctcaccccgtacctaggctagagtgcagtggcactgccgtctcgggtcactgcaacctccgcctccccggttcaagcgcagtggcgcaagtctcgggtcactgcaacctccacctccccggttcaagcaattcttgtgcctcatcctcccaagtagctgggattataggcgggtgccgccatacctgactaatttttatatttttagtaggggtttttgccatgttggccaggctggcctcgagctcctggccttaagtgatcattctgtgttgactgtttacctatgtttccttatgttattgtaacatcatgttttttccttagagctctttgaaactgttttcaatttgttaattattatgtgcccactatgtgtcaggcacattccaagaacagtaaatgtaattttttagaagtttattttcaccaattgatcttctcacttttgcccagtggttggatataactactaatttgatcagaatataatgagtcatagtaaccaagctcctcccactccacttctttcctaatccccagtactctccatgtccccccgtcaaatgacagtgtcatattcaaggattgtcactttgactgtaactgatacagacctaccttggaggatagcatttttgtttaggaatatttcatgatgtacctagcattttgtaagcagaaaggagtgtcacttggctgtcctgctaattctgcctatttgggggaggtggtgaggtctaagcatgagtttaaaaaaaaaaaatgaaaaacctctacccaaattatgtgatacatatgcatgtcgggaaccacaaatgggtataatattatatcctaattcctactaaggacacattagtctcttcttaatttatagcttcacactagcaagggtgctaggggataagacagtggatgcctttgccattttcccccataaacactaattactgaattgcctacagttctttttttttcttttgagacggagtctcgctctgttgcccaggctggagtgcagtggcacgatgtcagttcaccatagcccccgcctcccgggttcaagcgattctccttcctcagcctcctgagtagctggaactacaggtgcacaccaccatgcctggctaatttttgtattttaggtagagacagggtttcactatgttggccaggctggtctcgaactcctgaccttgtgatctgcccgccttggcctcccaaagtactgggattacaggcgtgagccactgcacccggctgcctatagttgttaggtgtgtcatcttgagacatccttccatgacattggatagactgttccttgtgctgaggataccctgtccctccttgttaactttcctctctttctctactccctttcttctttactcttccaccgagacctctgtgtttccatttgaccttgtagaaacaggttttagcatttcccttatagcttaagcctttatatcttgaatattggactattcactaactagagggtaagatttccttgacctgtatcgttcatacggtgtgagagagttaggagacgagctgaagccagaaactggggcctgaaggaaagcggcttagtgcttttgacacattgtcttcacattgatacagctttgggctttgaaatacaatttcaggtttcaaggctttttcctgctgttaaaaccagcagtttcatttatattaattttctcaactattctctaatatccttaccacccattgttagaaattaggtgtttcaaagattttagatttcatagatacatacttcaagcaacttttattggaattttgtcagaaaaatcatttggttattccaagtctgaaattctagtctctgacctcagaccctcctccttccccattgagaaaaaaatttctatgatataattcaggtaggttgaggtgttttttgtttgttttctttttttgtttgtttcttttgagataggatctctctttgttgcttaggctagagtgcagtggaacaaacacttctcactgcagacttgaccacctgggccttaaatgatcctcactcctcaagccttccaagtagtgggactgcaggcacatgtcatcatgcccagctaattgttttttcattttttgtagagacggggtctcactatgctgcccaggctggcctcaaactcctaggttcaagcaatcctcctatttcagcctcccaaagtggtgggattacaggcatgagctacaatgcctgacctgagatttcttaagaacgtaactatcactgaacagacttcatctcttttatagtgctaaagcacgtactatttttgtgtgcatctctttggttgcatgtctgtttccccacccaagtgtcttgagagcagagatcatccctttttgtctttaacctcccagtgactagcatagtgcctgctgcattcttgatactcagttatttaaagaatagcatcttgataactatattagtaatattttcaaagacccatctctgggtcccaagtagatctcattgttggattgctaatggttcttgtgtcacattttcaggatcagtaattgttttatagaattgatctgagacttgataatgaatccacgaaaactgtattgaatgtgcttgtggcacagttttttctttttcacttaacatttaaattaggatatgttgtagagggcagtaaagaatagatttatgcttatttttggatactacacaaaatgaatattccttagtattagaattgtttagtgtacagtgacatacatttccaaatgattattatattgagatactgaactcttgaacacacacgtggtttattcagcatataaaatgttttcatttatagatattttaaactgcattataacttatagacatttttaattgtttagatatttcaagtttgtgtacataagttgcttactcaattgactaaaccattatgtgttaaaacttctttttctgcagagatgcaattgagaacaacatggattttatgggattaattataatgcagaacaaattaaagcaagaaacccctgcagtacttgaagatttgcataaagccaacattcgcaccgtcatggtcacaggttagactttataaaagaacacagaagcaaatggagtgtgacagagctgaagttatattatattgagggataatcagttataaaatcatattatatagtctatagtggtttcaacctaagttctcttttagctctgaatattttcccaagcgcaagataactttgtcatattctttttgaggtctagcgaatcctatttatagaaagtgtagtagaatagtaaaagtacggccgggcgcggtggctcacgcctgtaatcccagcactttgggaggccgaggcgggtggatcatgaggtcaggagattgagaccatcctggctaacaaggtgaaaccccgtctctactaaaaatacaaaaaattagccgggagcggtggcgggtgcctgtagtcccagctactcgggaggctgaggcaggagaatggcgtgaacccgggaagcggagcttgcagtgagccgagattgcgccactgcagtccgcagtccggcctgggcgacagagcgagactccgtctcaaaaaaaaaaaaaaaaaaaaaagaatagtaaaagtacactgtaaaaatttaaacttgactcctttttgttttctctctttattcgtatatttcttatagcacttattgtaccttgtgttatttgtagatttgttttctgtactagaatataagattcttgagggttaggagtatattttactcatgttggggtcctttgcaacttttagaactgtcagctacatagaaaatgattaatagatattcgatagcatgaaatgtttatatgtaagatattgtttattaccctagcttgaattctagtgaaatagcctacttttttttttctagtacatctaagggattctcctgatgttactatactgttgataatattagataactcttactcattagctgtgtgaaattgtggtagctctgttttttgtttttttttcttagcagataatcagatttaagatacttaatggcacttacgtgttcagtaagactaatatggagaaagtctgtatacatttttgtgttttagactcttgagatctatctaataacataattttaccgtataactcaaggtaactaagtctgttagcattccagccattcttagttcttgcgtcttctttgtcaagacacttttcacctgttcctcgtcctcctcttttatttatttatttattttccccttgccagaatatggctttgtgtaccaaaggtcataggaagatattcttggaaatagtgtgtggaaattgaggaaagaaatatctcgctcttctgttttggtagcagtgggatccacaaacctttgtctgcttctccttaataagatcctgttcttgctgctcttctttcttctcatgactgagaagttgtctctcttgtttctcgtttacacctgttcttattacctgtcttacctttttgttttgtatgatcttgcttttgtaattcatcattttctatgatatggtgctggtgttcttgcacagaccactagtcactttgtaaagttatttcggtaagtatttattgagccacctgatctgtgtgtagcaccgtgccaggtattgtgtagatacaaatagtgcatgactggaaaagattgagaattatatttggctttaaaaattgtgggtgagatgttttctttagcatataacgtgcttgcgttatttgaggcttcttttgataagtatgctccaattttgttatttttaaactgtaagtggaagaaccatacattatcgttactctgccagcccagtcatggagactgtagtagattctcagcaagtacatgtttgatacgttcacgtttccattttaatttcaatacatttaaaatattttgaaaattaggtgacagtatgttgactgctgtctctgtggccagagattgtggaatgattctacctcaggataaagtgattattgctgaagcattacctccaaaggatgggaaagttgccaaaataaattggcattatgcagactccctcacgcagtgcagtcatccatcagcaattgacccagaggtaaggtcaagatcgactgtccgttttaaagtttgttgatttaaatttagtctgaaaaaataaaaaaagtggtgcattaaaacacagtaaagcaaaaactaaatgaaaacagaagtcagggctattttttcagagattatgtttcattaggactgggacagacccaggaatctcaatgttcaaattttgatatttagctaagatgagaagcatagttttaaagtacaagaattccagatgtttatcgtattcttcaggtaactagtggtaaatgatgcaggtggtccatcatactcagttcatgcatcatttcaaattgaagctgatatttaattgagtttctttttactttgaataaatgtccggctttcatcatgttgtggaacatatcaaatgaaagaattcagttttagaacaaatatgtttaaaatagaattgttttacttggtttggttgcctaaatattgttcccaatgtctcatatacacaggctattccggttaaattggtccatgatagcttagaggatcttcaaatgactcgttatcattttgcaatgaatggaaaatcattctcagtgatactggagcattttcaagaccttgttcctaaggtaagtaatttgggtgtatgtgtgtgctcacatgaatgcatcgcaacagtattttaaaaaaatttgtattattgtttccagttgatgttgcatggcaccgtgtttgcccgtatggcacctgatcagaagacacagttgatagaagcattgcaaaatgttgagtaagtattggtgtcttttttggttttggtttttgatgaatgatggtttcatttcagcatcagaaaaataatttttatatgtttcttatactaatatttcatatttatatatataattgtgatctataagatagttcagaactttaagtgccgctttaaaagagtctcatgtgctttttatttagctaaagtacaatatccacagttttttctctatgacttcattctttcaggtgctctatcttgatagaagtggctaatcattttagtaaacagttatgtttcaggttattaagggataaatttttactgataacgttaaaagtagccatactaaagactgtaggcacaagcgctttgctctaaagatgaggaaattgagacaccaaaatgatttgccgataatgtgacagaaataggacaataacctagctcatttcacttgtggtctggtgctgtttgcaaagcagcacacctgtgttcattatagtgaaaagattcatagttccactgggggaatcttggtgtgttagctctttataatactgtaatagaaaagtcttaataagttaaatgttttgtagtttaagaaattaattaaaatcttaacattgttttgtttcttagttattttgttgggatgtgtggtgatggcgcaaatgattgtggtgtaagtatagtttttgtgatttagttttatagttcttactctagcctaaatcatattcacaaaacttaaccagttttcttaaaattattaggctttgaagagggcacacggaggcatttccttatcggagctcgaagcttcagtggcatctccctttacctctaagactcctagtatttcctgtgtgccaaaccttatcaggtagtacaaattaaaatttttctcatccctttttctctgtctctgataatacagaagagaaaattatcataaaaagtaacatgaatttgtttaatattagcagattagcacatttgagctgtaacttattagtaacagattgattgctactcctcatttggtttagttcttttggtggataagcactttgttgtagccgttgaatgttgatgttcatctgtcaagataaaattgtggtttggaaaaggagtttaaaatgcttctattcatatgccgacatttgatttcttttcacagggaaggccgtgctgctttaataacttccttctgtgtgtttaaattcatggcattgtacagcattatccagtacttcagtgttactctgctgtattctgtgagtattaacattgtgtgcagagataacacttaatgtgcaccgtaaattaagatgttgagcgtatgtgtttgattttgaatgcatccattagtaattgtttctgtgagtagtacctataaatttaccttcaatttactgtagtttgaatagcaaattgaaaaagttaaaatgagaaaagatgtttcaacagtggtttgttgaatttggagaatggtttgcatttggagaaaaagtataaacagcgatggccacaggtaccctatcagattttataatcaaagtgttctgacatcctaaagactcatggtgacactatcccatttgaccgtttgtagaaagtatcagaagggatggtattagatgaagatactaatttacaacgttgaatattttgagtaaatgtttgtgttttctttttgccaaaaaaaccatgttggccagggtggtctcgatctcttgacctagtgatctgcccgcctcggcctcccaaagtgctgggattacaggtgtgagtcaccgcgcccagcctattgaacgaattttaaggagatgccttttatactaatatactaaatcaaatatttataaatatatgttatatttagtttcagagacacttatatttcaatttttaagcaggtccgagtgtcatttttaagttgtcattatagggaaaatccaaactattaataaaacctggggacgctataaaaataattcccaaaaactaataatgtttttaaaattacttctgtagatcttaagtaacctaggagacttccagtttctcttcattgatctggcaatcattttggtagtggtatttacaagtgagtattttgctttgttattgatttttaaagtgtatgaaattctgatgtgacttattaaatttttgtaaatttacatcaacaattgtaacatagctcacacctctccagattccttgtaaatatgttattttattaccagttgtttatatcttgcgccaattttttaattgttctgtctctatttttttccctgaaatatttgaaaataagttttgagtcattatgctcttttgcctctgacaattttagtatatattttctaaaagcaaaaccattcttttatgtaactaaatacagttgtaaagatcaggaaatttaacattgatataatatctggtgcaaaacctatattcaggttttgtcatttgtgtcaacaatgtcctttatgcctattttcccgtagtcccctagattagaacaaaaaatatctccagacattgccagatgctcctttggggtgcaaaatcctccagttgagaaccacttatctttagtagatgataaaactagtgaaagtttgatgaggagcaggattttcacagtctcaaagtatcttttcacaaggtgctagttacaaagggaaaaatagaaatttctttttttctttttttttttttttttgagacagagtctgtctctgtcacccaggctggagtgcagtggcacgatctcagctcactgcaacctccgcctcccgagttcaagcgattctcctgcctcagcctcctgagtagctgggattacaggtgtgcaccatcatgccctgctaatttttatatttttagtagaatcggggtttcaccatgttggccaggccagtctctaactcctgacctcaagtggtccgcccgcctcggcctcccaaattgctgggattacaggcgtgagccagtgtgcccagctgaaaaataggaactttatagtggaaaacttgtgtataccaccttaataagtaatgaaagcctttttgaaaaatgtttctgctatgtttatattgcttcaaacattgtgaatatcgtaagaggaagaagtgtgtattattttaactgtagttttgcaattaaagattcagaatataatggcctcttaaatatatgagatgattaactttatagttattgtgtttatatttagttttactattttttaatttaaaattatttatttatttatttatttatttatttatttatttatttattgtagagatggggtttcactatgttgcccatgctggtctcaaacttctgggctcaagtgattctcccactgtggcctcccaaattgctgggattccaagtgtgagccaccgtgcctggcctagttttatttgttaatattactgctgaatttcaatagaaatgtaaaaattattcctgaggcgtttttcaaaaagcctacactgtttacttttacagattatttaaatatgtacgatatgtggcttggtttttgaagattttttgtattaaagaattgttaggcaaaaacaaatttttaaagttcctaaatgaatctagttatgccttatatagtgatagattaatgtaaatacaaacctttcctctttttcttttcaatatagtgagtttaaatcctgcctggaaagaacttgtggcacaaagaccaccttcgggtcttatatctggggcccttctcttctccgttttgtctcagattatcatctgcattggatttcaatctttgggttttttttgggtcaaacagcaaccttggtatgaagtgtggcatccaaaatcagagtaagttggtcaatctatgtaaaaatctatataaaatatgtgcaacatatatgatataaaaatgagtttagaagttaatataaaagtttgtgccaggtgcggtggctcacacctgtagtcctagtactttggggaggccgaggcaggtagatcacttgagaccaggagtttgatgacttgagaccaggagttcgagaccagcctggttaacatggtgaatccccgtctctactaaaaatacaaaaattagccgagcatggtggtgcctttctgtaatcccagcaacttgggaggcttgaggcaggagaatcacttgaacctgggaggcagaggttgcagtgagccaagagattgttttttgagacaaagtttgcatgcaggctgctttaaacacttacataatttggcttgtatttgcctgtatatcacggtcacgcctgtctttgggaagatgttcaggcaaaatcctaataatcctaccaaaatggggatcttagatcagtttcttaatttgttactgagccttacttatctgtaaaataagaaagttggaattaatctctggggcctcttctaaacccagagtgttttgtatttctaatctttcatcccccagtttaggaaatggcattttaaaacttaaggggaaaaataaattaggtgcatttgcttttcgtagagtgtagagtgctttacggatcacaaattataacattttaattaattaaacgtgttaattttgtagaattaaattttcagatgtaaacatttatttctagtttgcttgactgagggatattatctttaaaatttttagaagattgtaggagatttaacattactttttttatatgtgcgtagaaacactgcacatgcaaaaaaaaaagaggtggaattttcttgagaatcttcccatagttcacttgcagcatagtctgttaatcacgtttcgtgagcacttacctgtgtttataattcatgctttagtaatgattgttggggacttctcatcgttagctgtttctgtgcctgatggtcctgcctacctgaaagtagaaatgagggacagccatagctggagaatattgagggacatctcagcaccggggactcgctaggcatttgcatgagtcaacttgtgatgtaggtaccaacatttaaccagcgaggaggtaggctcagggagagtgaataatatttcctcagttagcactgaaaagtgatagtgcttgggtcaagcccattgtctctgttttcactctgctaaaattactcccaaaattaaaaaaactgaggggggcttattaaatatttcctacttgattctaattttttaagtggttgagatgtcggactgaagagaaaacccttcatactcttgtacctgttttatatatcttatattgatattgttggaccttttgctgtaaatatcatatttctatttgttatgatagtgattcagggcaattaaggtaagattggtttcttttgggaaatgagtattatgtttactaatgcagacattttttgcatgtgttctagtgcttgtaatacaacaggaagcgggttttggaattcttcacacgtagacaatgaaaccgaacttgatgaacataatatacaaaattatgaaaataccacagtgttttttatttccagttttcagtacctcatagtggcaattgccttttcaaaaggaaaacccttcaggcaaccttgctacaaaaattgtaagtttggcatttattgtgatttccaccctgcttgcccctttaaaactaatgtagaagagaataattataactgtctttgccacagtaaaccagatcttcacagatagaatcaacttagtgatttagatgtttaccgttttgttttactttcattggtagttgccaccctaagtttaaagttcaagctaccagtgttaagcactgttgtttttcacatcatagtgcctctggctccagcttttatttctgcaacccattgtggagggagttaggatgggaagtggagacggaggttcctcagcccactgttgggtgagttaggatcgggggcggagacggaggttcctcagcccactgcggagggagttaggaatggaagcggagacagaggttcctcagttggaacagtaggtattatactttcctcccgggcggtctgcgcagcatctgccatcttcttcatttccgacgctggtgtggcctgtgttcacctctgggattcttcatttctagtatctttgcatgctattgcagaaagggccagtatactgaatggaggcctgtgcccttgtggacttgtctatggcaatagaatataccattttgattgatcaaaattagagtttatggaaaaaaatcagttactacatataaattgccaattaaaaaaaattgagaatacactaatatatggaacaacttttagacttctgcagtatcttggagcaaatagcaattattcttttgctgtagttatgactaggtggcagtgttctagttggcaggtcacaggtatcggtatgtcataggaatcacaactattagtgtctctgtctcatattagcatttataaggcattttctcatacattatcttatttgtcacttctaccctgttggtttgtagggcaagttttattactttatattttgtgcaggtaagattacaatctgatctcactggtaatttttccttttttttgccccctttttggaactgatgtttcttattttaaaaataactatattattacttatttattgttatatattgctatataactatactaataactgtgttactaagaactttaaaaaataactattattttaaaaataactatattatttattagttgtgtattgctgtataaccatactaataactatgttactaagaactgtattagaaccatgctacaggatgaaaaaccttccatggaaggtttgccacggtatttctaaaaggattttttactacagataacttattataaggtgcatttaatcattagcattggtatacattttattcaacatttttaaatttcaaggaaatgttgaacacatgtaagggtagctgaaaacatctaggaaaaaacattgcttttttttttttaatttgaagaaaactggtattcagactggtttgcaagcaagacagctctatcaagaaagttaattttagagatctaccctatccacactgttagaattaaaaaagagaaagggagaatattagttgcctgtttctaaagatgcatcttctatatgtttggaaaacttattaaaaaaggtttaagaaattttgttttctcgtttaatttccaatttactagaataaataataaacactatttttggccactggatgatttaaaaatgtactaagattatatttagcagaaatataaccataaaactcgattgccgttactgtcagcagcttgtgtacttctctcagtgggtaaacagaagcacttgctgttgtaaagcatgccttctgaaaagtacgaaaggagcagtgcagttgatgcaggcattctgccagttttcacctcttgtctgtgtgtcactggatccatgcagagtcctttctaggacctgtctgttagttttcacctcttgtctgtttgtcactggagtccatgcagggtcctttgctaggacctgccagttgttgctctctataaatggtgtgtaatatattaaaagtattttgaagttatgatttttaagaattaatctcagccttaggcgtttaaggaattctctttagagttttttgctttcttgtactggttcacttttaatctaaattaaacttaacttcagtctgtgtggttacctgttttcaacttgagcttcacagttacattttctcattcagctgccttcatttcaagggtcatgatatgcacttaattcttaacactctcctttaactagacatgatttcttgggatttggcttcaatttttaatgcagtttcttgttggatcatccctacagtttattgcttgtgctatctaatccctttgtctatgaaggcattactactgaattgccagggtctttcctattcagggcctatgtatctttttcctattcatctagcatgcctaaattggttgaagccattcagatacctagaggccctacagaataaggtgaccttttaaagacataactggataaggggagagggataggaataaaaaggcttaggatttgtggctgtaggttagttagtactagttattgtttggggaaggaacaaagagatatatattggggtaaatattgtatgtgtgtctaccttatttcggagtcactaaggaaaatatgaaggaaatcctttctggtaccttattttgataccatagtccatcggtggcatctggtatcatgaacagcacatcatatgttgccacaagctgaaaaatatttcataataacttcaatttacatgttgctatatactttgaatacttaaaaatctcttatttcctacagaatccttatcatatccccattttatagataaaataatttgactgtaaatgacttgtttagattcacatagctttgtggaagaatcaatctaaaacaatctaaatcttaaggaacacccttgaccctggcctgcagtcaccagtgacacacagtttgttttgatagctgtcttctggtgaagaatgtttacactttagtacaattactaagccattgcttataatgctaggagaatctaggagctgagagcatagtctacaagaaattcatacctctctaaagtgaatacctaattcttctattcttggttgaaatccttactgattttaaaatttggtatggttgtatgtctgccagccatccttctctcccctgtcacttagtgtcttttttggatagtgccttttttttttcctccaggctaaacaaagatagattcagttacttatcttctctctcacatggaaatcttggcagatttttagaggtgggatccaagaggtggctctgggagagacatgaaaatttgagaaacaaacattgtttaggtagatgtaaagaagcttctgtgcttgagtaaattttttttttttttttttgccaacgacacacatgtcaagaaccaggtcgcaaatctgtttttgctgtggtttgaaaaatgcaatcagatttgaaaaacatgcaatatggcttattacttcattgaatttcttttttagtctccgtgtttctctctgccatttatgttctgaccattgctttttgtcctttttctgattttgtcttttttcttttctgtttttatatacttccaaccaccactttccaaacactttttccttatctgaccataactacttaaatgaccatagaacttacatgatactttagttgctgcatttgtgaaacaggatgtcacatttcctatttacaatttagtagaattactttttacccaatatgagtcccacttttttttttttttttttttgagatggagtctcgctctgtcacccaggctagagtggagtggcgtgatctctgttcactgccagctccgcctcccgtgttcacactattttcctgcctcagcctcccgagaagctgggactacaggcacccgccaccacgcctggctaattttttgtgtttttagtagagacagggtttcaccgtgttagccaggatggtctcgttatcctgacctcgtgatccgcccgcctcggcctcccaaagtgctaggattacaggcgtgagccaccgtgcccagccccacattttttttaatccttttggtcagtggctcatggtaaaaaatatgtctccacctttggtataagtgttagtgtaagtttcagcctaagctactaaaactatatatatatatatatatacaccctacacactggtatatataaacataaaaataatatagtatagtttctgtagaatgataaatatttacctgtagttttgaattgatattaacaaagtttatatttacaaataacatccacgtttaaaaatggcactgagacccttcatttacagtcagtaaaaagtaagttctttacccagtctggaggcttcatgataaagtttttgtatgtggtcttagtaaagtttgagtttgaagtggagttcaaataggaagttgtaaataaatgtccagatcaaaggaaaaggggaaaaaagtttgggctatcaatatattagaaaattttggagccacttttatggcttattattatacaagtatatgcttatatacatgtgtgtatatgtgtagatgtacacacttaagaaaatggccatgagcaagcagtttggtttttgagttaggaaagtgagacaaagtactgctgggtggatttgccattcccagctcccatagcaagccataaggtcagcccactttgaaaaatagtagatcaactcagtctcttggcttttggctaagattttctgtgaaaacattttcacagtgtaaatcagtgaaaaaatgggattcacttactagaaatacatttacatttaggttagaatgcctctatttaggattaagacatacccaatactgaaaataagtgttattcagcatttttacagtcaatagtaattgtcattgaatacatgttttaaatgataatctcattttgccacacatagtttagtctcttatttgtgcattatgtattggctttattatcttacaaagtagctatccatttgggcgacatacaaatgtctgtgaaggtctgagtcttatttttttaagtgctgattattttctgaaggactttcacggttaaagttaatggagtttaaacataacatcacgttgtgtatgtgaatcttttgggtgccccgaacaatgtctcatactccaggagataacagagcacatactttattccatcaactgaagtgaaagtattcaaaaccaaatttacaaatgacagtataccagctgttattggatgcctttttatataaaggaatttcctaatttacttgttttacttttgctgtcttttccagatttttttgttttttctgtgatttttttatatatttttatattattcatcatgttgtatccagttgcctctgttgaccaggttcttcaggtaagacttaagcacatcatttgtttggggaaaaagactaacctgtatacatttctttttttccaggatctcttctttttgtgtattctaagatgctgttatattaacccaaagatactctacagagaataaagaacctaatgaaaatagcagcttttcttagctatacctgtttaatctctgcttctggtgccgttttcatttgtctgcaaacaaattaaatagcccttggtctttaaaaacataaaaaaacgttgatcctggtacctgttactcctctcttctctaccagtctacttcttgagtagtctacacatgctcccttttgtgttttggccatttagttcttcaattcttttcattaaaaactttctgagtaatgaaatacttgtttttcatacaaaagaatatgcacacatatttaagttgttagccataattaaaaaatagtaaagagataacaccctgagtgtatcatccaacctgaaaaaatgaacattacctgagcacaagtcagtgacaaaagaaaacaaaaaaaaggtaacgttaccaatcaataaggcactctcatgtacctgttttgatgattttccctgtcattccctgtttcattatatacttaccatatatgtttgcagtcataaaagatagttttgtgtgctcttgaacttcatgaaaatgttatcttgttcccttttttctgtgacttgcattctcccatcaacattgtttgttgatacattattttattttcattgctgtatagtatacaattgtaggaatatattaaattcatttctccatcctctgttggtaaataattactgaacatattgctgctatgaacatatttttacatgtctttcagtgtatgggggtaagtaatagtgtatgaaagagtggagtaggagtggtttatcccaggtacaagcagtgagagagtggtgcgatgctgtagagaatttgcaaacagtgattaagcccagtagaagtccatctgctttttaaatattgccatgtgctggtaattccagacacttccagtggtaatatactccttccactactacccttggcaaaccattagggacaaaagtttcctctgctgtattctggtatcatgatgagcatgtactcttcagctaccacgtgccaagttgttttccaaagtgattgtatcaatcatccatcagtgtttgacatcctgttgtttcacatcattgccaacacttggtcttgtccagtgggtgtaaaatgttatatcatgatggttttactttgctcattaactttactaatggagttgagcattttttcatgtgtttaatggccatttttattttctctgtgaactgcctattcatgcctttggccaattttttctaggatgttgtcttttttaaaaatttttaggatgttgtcttttttttaaaacttagttttcagagttcttaatgtattatatttgactgtatagtgataaatatcttctcccagtttgtggcttgtctttttactttgtttataatatctctttttaaaaaacaaacttatagtctgacatggcaaatttattaatttctttctttatttgttcctcgtgtctcagtttggcggacttgtccatctcaaagttataaagatactctcacatttagtctttaatccatctggaattaattttatgtatagcttttgaatagggatcaaatttctttttctttttttctcttacgcatacccatttgtttcagcaattgcttattgaagtttgtctttgccactgatattcagtgatacctttgtcttatatcagtttccttccttccttccttcattccttctttccttcctcccccgcctcccctctcctccctccctccctccctcccttccttccttccttccttccttccttccgtccgtccgtctgtctgtcacccacgctgcagtgcagtggtatgatctcagctcactgtggcctcgacctcctgggctcaagtggtcctcccaccacagcctcctgagtagctgggaccacagttgtgcaccaccacacccagcaaattttaaaattttttgtaataaaaattataaatggggtttgtaatggggtttcactgtgttgcccagtctgacccccaactcctgggctcaagtgatcctcctgcctcagcctccgaaagtattaagattacaggcatgagccatggcgcctggccacagttttccatatatatgactaatagtgttttagggactccatattttgttgtttagttctctttatttgtgccagtactatattgtccatgctaccatgactttataagaaaccttgatacatgcttgggtaggactcctacccccctctcacattgttgttcatcatgacctttttggctgtgcttgagctttccttcttcctccttttgtgtgtgtgtgtgtgtgtgtgtgtgtgtgtgtgtgtgtgtgtgtgtgtcagaatctggctctggtacccaggctggagtgcagcccactgcaagctttgtctctcggattcaagcgattctcctgcctcggcctcacgagtagctggcacctgccacaacgcctggctctaattttttctattcttagtagagatgggttttcaccatgttggccaggcttgtcttgaactcttgacctcgggtgagctccctgccttggtgagccactgtgcccagctaagcttttcttcttaacttttaagtttagtttgtcaaataccaggaaaagccctttcggaactattagaattacacagagttgatcaataaattttgagggtgaattcattagttttccttcccacaaacagtatctcgttctgtttctgtctttttgacctaatgtctttcagtaagtcagatagttttctccctaatggtttttgtacattttttgttagattcttagagtaataacagtttttgatcccttgataaattataattaaaatgacattttctaattttttatgttgttgaactcaatacagttgttttagatattcatcttgttcccagaagccttatcagactttattcagacacattttagattgtctaggattttctgtttagacaggcatcatatataagtaattacaagctgtaattacttacttgactccccagcagtttgtttctgacatttcacagtctttatgtgctttttctgtatttttcatgtcttaatatattagttatagtgatagtgatatccttgtcttactcttgtctctaaaggacgtgttcctaatagttcaccattagataaactgtttgctgtatatttctagtgtatagtctttatcaggttaaggaagcttccttagttgtacagtgttgttaacataagtggttttaaatttttatctaatgcttttttttttgagatggagtctcgctctgtcgcccaggctggagtgcagtggcatgatctcggctcactgcaacctccacctcccgggttcaagcaattctcctgcctcagcctcccaagtagctgggattacaggcgtgtgccaccatgcctggctaagtttttgtgttcttagtagagatgggatttcaccatctggccagactggtatcgaactcctgacctcacgatccacccaccgtggcctcccaaagtgctgggattgcaggtgtgagccactgtgcccagccaatctaatgctttttctgcagctattgaaatggtcacacagtttttctccctgaagaatgtgatgaattatagctgatcagtattcaaatattgaactaactttgcatttctagaataaattcagtttggtcatgatgcacactctttgaaatttggatttaggttgctatgattttgttttggatttttgcctctgcatgaatgagatcagatttaattttcttttcttgtatgttacggacaggtttgatcttaaagttatataacttaaacttacaaagtttgtgaaatgagtattccattgcagggactttttagtaatttgtttagtcctgttttgctggatatttaggttggttccagtgttttgctattagaaacaatgtggtattgtaaggagaatggtgtgaacccgggaggcggagcttgcagtgagccaagatcacaccactgcactccaggctgggcgacagggcgagactccgtctcaaaaaaaaaaaaaaaaaaaaaaaaaagaatgtggtattgtaaatccttgcacacttcagttacagacaaatatatatttataggctaaatatgcaaaagtggaattgcttggtctgagggtatctataaatttaattttcataaattctgcattattgaactttgaagatgttccaggttgtagtcttaccagcagtatatgtctgtttccctgcatatttcattgaggggtttagataagcacttacagtaaaagaagaaaacaaaatgcattatatttctctcctggtgcacatgtcttctgtttcacaaccaactttttcttgaaatagtaccacattcagctcacctcccacacgttcgtcaactaatctggcatcttcccctgccaatctactgaaacggccctcagcaaggccgttagcctcttacttgttaagtccaatggacttttctccctaatgtatttttttccagtcttacttgactccccagcagtatttgacgagttagccatgtcatcattcttaagatactctcttctgaaattttgtgatgctttgctgtcttttggccttttcttagctctgactctccagtctcattttccactttggctccactccctctgcccattccttaaatgttagggttccttacatttctgttcttattcctctggtcactcaatacattctggtgatatcccctagagtcatggcttcacctgtaatcaccatctatatgttaaaggctcccaacctttataccctgagcctacctcactactaagctttagacctgcaaatacactgatatattgactgttacttgggtgttccacccaacagatccctcaatttaaacattttaagaactaagctcatcatgttctccttcaaccctttttcttctctgtttcttggtaccactatttattcaagtcagaagtgtgcatgcttgtgtacatgcgtgtgtgtctatttatctgtgccttttcttcctctttccgtagccagccatttgttagattctttcagttttcttattataaacctttctgtctttacaactatcccattttttaggccttagaaattaatcagattttaaagtgaacacttagattgttttttcttaacttcatctttttttatgaagttgtctttataattgagttttgaccagtacttcgttattagattggtacctctttttttttttttttaaggcaggttcttctgtcacccacgctggagtacagtggcaggatctcggctcactgcagcctccacttcccaggctcaagtgattctcgtggctcagccttttgagtagctgggattataggcatgcaccacctcgcctggctaatttttgtatttttagtagagacgagattttgccatgttgcccaggctaggctcaaactcctagcctcaagtgatctgcccacctctgcctcccaagatgttgggatcacaggcatgagccactgtgcctggctggtacctcattctttaaagatgggtttttattttgaaaatagaaactgttagacattcatgatctagtagagcatgggcttttgaatctgagtgaacaggatttgactctaacctcagtcacttaatattttctttaaccttgagttacttaaactttgagttttatcatctgaaagggaatataatatataccgcggggcattgttgaggattaagtagataatgtatatgaaggtgtttggtacatcataggaattcaataaatttagaaattatgatacagtgctataatattgactacatacaacaattttaactttaaaatgtttttgcattacagatagtgtgtgtaccatatcagtggcgtgtaactatgctcatcattgttcttgtcaatgcctttgtgtctatcacagtggaggtaagcacttccatagtcaaatggctaccatgttgctttggaattcttgggtgatttaatggtaaatgggagaagagggcaggtaatataatggaaagccacagagtctcagtttcatctcaggcaaattcatttagccttctcttgtgaacttttccatgaattgatagtggtcatattaagggaggtgacttagttgcactcacacagataggagaaaataagcaatgtgataataaaaattaatgacgagtagaaaggagagaagtttggggcctcggtggcccatgaaactgatgaaccagtgattgtgaaatcagagttggcatgtgccacctgtgttttgtgatgtacagtaaaatctcccatttaagggaggggggaagggggagggccattctccaggaaacacagtgaatattaatagcaagagagtttaatgaaagtataaaataataatcgttatggacttacctaatttcagcattgattactggaacatcctccttggtatttgcttttgagtgacctctagaggtcttaagtaccctttgattcactgtatattgtgtagttaccctcccgttaggattgcctttaggttagcgtctctaaaaggaggtagcaagttctcattggtggcttattaataagcttttgtctgctctctgaactactatcataattgactcttacagtaactataaaaatggaagagagagatacagttgtgatttttaagttaagagtttcatagcacaggcttttggatcaaaataaaggtaatttttttgagaaatatatatgcatatattttagtgataatagctctggtcttagaaattacacttaatttcaattaccccctaaaagatgacttggtatttaaatttgggatatgatgggcagcatggatattatggtactgaccttttgaagttgcccattgaaatgtgattttttttctattttatgggtgctaggaagcacatgtaagatactatattcttaaaatgtttctttttctacagtatcagttcatcttttcacagaaatgttacttattcttactacctaaagaatggtttgtgttggatgctgatgaaattatatatctatagatagggatatagaattagtactagatattcaatgaaaataaccattgtgaagaaagacttcaaattacataagcatcattttaatatgggaaagacctatttatacaaaagccatatttcatggaaaatttagaagtctcattttatcaagaattttatgatgatttgtatttgttacaaaagtcctatcattcttgatcatttggcagtattaactgaaattccatatatgaaaatcaaaatatccttttcatcaattatgcagcatgtgtgattttttaaaaaggtgcacattaataaaaaatgacttagtcattattaattcttaactcactggaatatctctcagaacttcttccttgacatggtcctttggaaagttgtgttcaaccgagacaaacaaggagagtatcggttcagcaccacacagccaccgcaggttggaactcagcacttcctgtcaattcttgctgcctctctaggctctctgcttgtgtactctgtattctctagcgtgttcttgttctgttatgtgttattctctagcgtgttcttgttctattacgtgttccttcagcctttttctctgtgcttggcatttcatttcttataagaagtcctagaaaattcatggcaaacatttgttagaggcttttcaagatcagaaatttcataagtctcctttccattccaatcctgatcttctatttgtgtaaaagtcttgtcctcaaaggtgagagttaatttttccatttcaatctactataaattttatgtttttgtttttcatgagtccccttagaagctaaatgagatttatataaacaaagtttgcaatgaaaactgtttcttcttggatcagagtccaaaggcccaaattctgaagaattatttctgatttcttgtcagttactgtcccttaatttggagtggctttttggctttctccagcgttgtataccttagtattcagaagatgatgtccttttttcatacaaaccgtggtttaggacatttgactttttgggtctgttaaacagcctgtcatttgaaaggtattgcaagttctgtggtaaagagagaagagaaacagaggaataaaacccatttcctagtgttaggatgttaaagtatagctcttgatacagatacagattggacttattttttaaacccatcctatgaatcagagctctttgaggcagctttttaggcatagagaatttgataaaatctcaccccttcattgccttacccatttttctttagagatgggtgatgtgctttacagataggagctctgagtctttcactcagccttgagccacaggaagctggtggagttgaagaggactccctggcatttttgagttgggttacccacttagttttagccaacttttacctaagtggtaccttcctgagctttattttggtcatccagcaggcctgatgtcctggtgtaatgccacaggcttgctttctaagagggcctgcagagtaccatttccgttttctaatgctttatggtgaataatgatggaatgcagtcagcctcagtttttttttttcctgaaagcagtgtaataccagttgtccctagtagtgcgtatgactagggttgtacaaggggctcaagtcgtttagcaaaatctcatctgtgtatacacacacacacacacacacacacacacacacaccccaacaccccaaccctcccacccccatatatatagttacctcactgcattacttcagaaggttatctttggcttatgtaatcaactctcatgtgaaatattcgtattgtattcctaggcctaggaaaacattccgatttttcatattctcccaagagatctctgactattgatctgaacaagaaattgcatgttttgaaggggagtaaccccggtttagctgaaagtaggcattataaggccccttaaaaatatttggattggaagactctccttgcttttcaaccaaaattaaatgatagaaaattctttttttggtctctgttttctaaaaaattattaggaaatatctgcccttctctttttgtgagaccagggtctcactctgtcacccaggctggagtgcagtggcgtgatcatggctcactgtagcctcgagctcctcaggctcagatgatcctcccacctcagcctcccgggtagctggcattagaggtgcatgccaccatgcccggcaacttttgtttgtttgttttgtagagatagggtttcaccatgttgctgggtagatggaactacaggtgcatgccatcccaggcccagcagttttttttttttttttttttttttttttttttttttgcagagaggaggttttgccatgttgcccgggctggtctcaaactcctgggttcaagccatctgcctgcctcggcctcccaaagtgctgggattacaggcgtgagccaccacgcttggcctgcccttctaatttttagaagtttgtgtttctacctctgaagtgttcatgggagagtgaaggtagagagtggtccagagcaggtgggccccagcacaccctgtgtgtcaactgattctgagaatcatcaaatagacaagaatttaagtcttccgtttctgtggtcatgattaaggtgcattttttaaagacttaaaaacttactggctttaggaaggagagttcttataacctcccagcacaaagtgacatactttcattctctgctacttctgtgtagtgttgcttcactgttaatgtttgtggctcttcaagagccagtctttagttaatcatattaccataaggccgtggttctcaatcggaggtgatttccccaggggacatttggcattgtctggaggcatttttggttgtcacagttggcagccccgggtgttaatacttactctctgaccaaaaaaaaaaaaaaaaaaaaaaaaaaattctttacgtcagtgattatcaagcaagattattcatcagaaatgctttgaattctacccttgacctactgaatggaaatcttcggtggagacccccatcatctgtggttttctataaagcaaccctgtttcaggagatctgtgtcgtatcttctctttagaagcatttgtgcctagcttgtgtctggtaaactgagggcacttagtagtggaactagaatcatactacctgtaatttgattatgcctgaggatttgtgcccaatttatgttttcttccttggtgaaaaatccaaaaaagtagtttgtatggtgtagtggtagtctttatgccacttagaatattatttgagcttatgtagacagaatgttaattctgattttctgtgtttgttttatattcaggattggtatggaagaagacttatgaaaaccacagcgccattataacatttttccttcaagcatggcattctgttttatatactgcccatgaaaacatttcctaaaagacattgctaagcgtaaacttgacatttttgaaagttctttttagtttctctgctaaactatgcatggtagcctctttccttctctgaggggatgaatttggtcactgaagcattcctttcagaaacaaactgaaagatccggttgctatagctactgtgttctgctttagggacttgtgccgtagaggttttggagagacccacatgctcattctgtgcccccgatgccctgtttcatggcctttgtgttacacagtacttgcctttctcccttcatcatcatcatctccccgctggctgatttctcattccagcatgcctgtagcaccttttattttctcttccagtgaattatattgtgtttgagaatgtgtgtggtatgtttgtgtttgtaaactaacaaacctatgcttgcatgtagtgtactttttgtgtatgatacttgggggaggtaggggtacaggaacaaaatgtttccaattatggtacagtagggggatccttagtgttcctcatgactttttaaaaattgtgacacgtgtacactgtttgtaatagggttgtgaggatatttttcaatgcataaaaagaatcctattcagttattgttctatttgcaaataaattaattttaattttattggttgacttactttccacaagtagggaacagtgaattgagatatgtgtgtgtttggctttccttaactcagcttgctacgtacgcattgctgttcaacctggcagactctttggacagacaagtcctattatgtttctgcttttttaaaaaaagtcagcagtcaacattagtttatttcctgtggtaatctaacagtgctacttaaaagtgacagcttttggccaggtgcggcggcttatgcctgtaatcccaccagcactttgggaggctgaggtggatggatcacggggtcaggagatcgagaccatcttggccaacgtggtgaaaccccgtctctactaaaatacaaaaaattagccgggcgtggtggcgcgtgcctgtaatcccagctacttgggaggctgaggcaggagaatcgcttgaacccgggagacagtggttgcagtgagcttagatcacgccactgcactccagcctggcgacagagcaagactccgtctcaaaaaaaaaaaaaaaaaggtgacagctttcgaattgatttaggaacagtggtttttttcccacaattagattgacaaatgacaccttgggagaaaagtaagatccaagtagtaaactgtcatctcagatgaaatattacgtttgttgtgtgcctatactggaaaggcattatctgttattttggatcacttgaagaatcctatacatagtgacttctgtaccttaatgctaaatattttcctgtggactttttttttaaggtgatgctgatataactctctttagttatgacagtaaaaaggctactaggcgagtaatcttcagactttccccgtccccaccccagaatgccacgtagcttacttttgtccaccttttttgcctttaaattcttggtagcagtgcagctgattgtgttttgttgacaggcttaagctagcagacctttaacattgagagcggtgagtcacgtttaccgtgctctcagcggggccagggaggagagggagagagtggtaggttcctgatggttgtttcaactggatgagaaagagctaccaagttaatatgaaaaagctttaagagctttaattttaaagtatttttgctcttctccattggccaatttagaaacatgtttcaaaatacatctatagctaacttgcctttttaaatcatgaggcattttgggtaacattagaatatgtagctcagttatgttctactctaccttgtgagattactgcatttagagctagttgtagcctggtttatatgttgattggcaaaacaaaatgacctggaatttaaatttcattttggagaagcaacagccaaaatcattacgaagtggctgttctttagaagtaaatataactactacgagtcctggtgtagtcatttatatttatttcaaatttcaattgagacaaattctgagggcccttttcagccctctattgagtttacatttctatgcattaaccagggactctgctttcttgttctccaaggatcatttatctaaggccaaattcactaaaaacatcaggattgatcagaaggatttcagtgacagcagagctttttgcaatgaaataatactaagcaatagtacttgttttatacccctttccagtcgtggagcaccgacggaaaccatcattataaaacagtattgttttttatattagtaaggatgaggttttaaaagacgtaattgacattaaacatgattgaagccctaattttgaccaaacgatatttacttcatgttttgagagatgatattaacagtaacaaggatacttgtacacagctttcttccaaaaatgatcatgcggctaagttgccaggagcaatagtaccaaaagatagtttgggacagaatgtgaagattttcaaattaaatattaaaaatgttttctctttctgaatggcttaaagttcttaatacattagatattctgtggtaaagaatccatatctgcaagttatttaaaaggtattagtacacaagagtataggtatataaaactaaatgaagtcaatcatattgattatccccccaaaaaaaatataatctaaagaataatcagttcctaaataattgaaagctgcccttacaaaataaaacaaaagaacacacatttcgttgtgttgcccaggctggtctcgaactcctgggctcaagcagtcctcccacctcgacctcccaagatgctgggatttcggacatgagccaccacgcccggccaaagctgcctttttttaacatggatttttttttcccccattcgttgtgctcagaagtcatttcctcttatttttctctgctaatgtgtgctttaacaaacctgtttaaaacgacaagcctttaatcaactggggtgttttgttttgtttttttcttattttcttaggagtcagtggatcggtggggaaaatgctgcttaccctgggccctgggctgtagaaagaagacaccaaaggcaaagtacatgtatctggcgcaggagctcttggttgatccagaatggccaccaaaacctcagacaaccacagaagctaaagctttagttaaggagaatggatcatgtcaaatcatcaccataacatagcagtgaatcagtctcagtggtattgctgatagcagtattcaggaatatgtgattttaggagtttctgatcctgtgtgtcagaatggcactagttcagtttatgtcccttctgatatagtagcttatttgacagctttgctcttccttaaaataaaaacagaaaaatatatcgtcctaacagttaaattaacaatcaatccataaagtcctatatcttcattcagcaacccaaatattacatacatttccagaattttcttgattgttactttcagtgatattctttatattgggtacaggagaagtttggtgtttggtaggtttttcaacattagtttttgagactagtttacctcttcacatttatgctcacaaccctcttgttagaaaagtctgtgtttatatacaggctgtaagtttgtgattgataaaaagaagatgagtgttaattagcctccagtgaaaatatactgaaagcctgttttcatttgattccaatgtttcttccaaagaattctgtataaacatatgccaattccctatgatggtctagagttaggaatgagtgtttatggtgttgcttatagaacaactcaggtaatctccatttctggttttatattttctgtacaaactgcctgggttttatttttctaatcagcaaggtgcttcactgccttcttgagacgcctctcaaagctcttaaatggctcctgtgctatgtgtggtgttggcagtctaatttgcttctgttaaatgttgtagaacctttttcactaggaaataagattcatttctttcggcagtagatgtagattcatcttttaacgtttcttcaaatttgtttctgtcaggctttgtgttattttaaatggttttttaaaattttcttctatgttttcaattacctaaagacataggataatagttttttttaagttagaattttacctcataaaattttttgaggtttgatgtatgtctctgtcttatcaataatgaggcttaaaaaatactggatttgaatggctgccgttttttcaaagcaatatgaatttgatgagtttgttttatgccattaggtggcgccagaggtcagaacatgtctattttgaattggatcgttacaaatgagcatatttgatgcggaaatttctgggagaaaaaaaattgaggaaataaagttaaaaaattgacattcattgagccaaaagagatgtggagaaacatttttcacctttctgtttggcctgattaacatttaaattcttgccaaaattaaggtaacttttaaaaaacaccttttataggtggatccagcagtctggcaacgcccacagttaccacaacacagaaaactgatcgtgctataaaatggacgctaaactatgaaaacagtgtgacattgttctctgttcttccagagccagtaacatgcttgctcgtgctttctacttctagctgatcattcttttcccaacatatatttacaaatttaccaaattttacctagaattttaggaccaaatggttctcactctttatgctgcaaagacctggatgatgtttggtaactatagaaaaatagaaattacactcaggatcactgttactgctattgccactgatgattcctgcaaaaatataatcgaagttttccatcaaatgtataatatgctattaatacacattagatgataacagttgttccatgaatgattctatgaagctatgcatcttagacctcttgagctgtgaattagcactattttctatagttacttattctctggatcattttataatttccatattaatttcaaatatgctcgtgttattcttcagtgatttccacaattgtgcattttattctttggtttaagtactgaagcatataatgaaagtaattgctaagtagcagcttaaaaattcaattatccgattgtatttaacatctttaagagcatgatcataaagagctatttttgacaccccccccccacttttttaacatttagagttagtaagggttttatatctcttctgtccatattgttttcaaaggaatgaggtgtttaggtggctggaaaagcatttgtaggaagttagatttgaatatagacaaggtgggttattcacgttgagaatgttatttgaagaatgcctgtgaagccaggtgtgggttctactcagtgccatagatagactgagtcttctctcgtaggttaccattacatagtaattttgattctgaatttcacattaaattatttgagtttatacagacctaaattttaaaatctgtacatatattattttgatgtattaagatgaatattgctgatttaaattttatttatgcacatacttaaaggacagaaatgtctgggaaagtaattgttaaataatgatatgtaactttttaactttttaaataaataacaagatttttaatgtgtgtctccctcagggttgtttaaagttttttttctccctcaagtataaatagtggtaactatatgttttgtatcttctagcaccaactgctgtaaagcaatgctgcaaataatgcttgaatacaagtggctaagccaacaacagaataaatacttttatagtagttttataatcctgaaattcgaaagctttcccaattgcacttgcatctaaacaaaactgttgcagtttttactctatttattttgttccccatgtttatgaaagtcctgcacagtttcaaaggcatggtaaataatatatcaatgtttatgtagtctgttacagaaacagctatagataacattatccagtgaagagcaaaattcaagctttagaaaatattcatgcatgcaattttgacatatctaaaaataggtttttgtatatttatggtgggaggtggttgggaacttttaacaaaatggggtgttaatttttgtacagtctgtgggcatttacacatttttaatgtattaaaatttggtaattatgtgtacattaaattaataaaagttacttctagttatgatttgtgaattccctaagaccttggatttttttaagtaactttatatcagaaatgatactgcatctttatatttttaaaattgtattgctgctcaagaatggtaccctcttgtcaaaaaggcatacattcataattgtacattcagcattgtaaataatcttatgaaaccttttttgattgaagctattcaaaataaaaattttaatgaatgaaataacactttttttctgtgtctttattcatttgtttgctttttagtgacatgaatactgccctttgtggatttattttcctgcctaataatacttccccatttccttcttttttttttttaaaaaaaactggattttgaaggaaataagaacaacattctgcatatcatgccatgtgtgtgagcatcctggggaaaccccacagtcggatgcagtgtagagccaaatgttaaatgcgaggaggtctgagggcaatggtgaaatgaaatagaagagtagggacttataatctattaatagttgggagaatcaaaccaaaagctaataccatggagagagaaaatggttgtaaaaatcccagagaagacaggacctttgtgtgtgggtgggagttgtttccatggagctcagctccgggagacacggagcccctgctagggaatatgtggctggctgtggtgtgatgaattcggggggtgagggcctgcctgcctttagctcaagttcttaacagtcgctatggtttgtgcggcatgtgtgatcctgtccccacagcctgctggtgtgggcacagttctgcatgtctctccttccgctgtatcactgccaagggacagggagtcctaggggcttgagtgagactgtccgtggtccaagttggggtgtggttgctccctgctgtgcccggcccactgagtctccctcagaggaaaaaggcttatctcacccaggcacagacctgcttttgaatagccaagccccttaagccaggtaactgttttacagcagacttctgacctggtaatggatacagaatcttaagacttggaagcactggagctgtcaacttccttgctccaaatacttctcattacctcatcaacttgctcagtggatggactaagagtgttcccccactctgcaactgccatacctacttttcccttcctggacaatcaaagtgtcttcctaagggacaaaatgtagaggccattctgactggaggttttcctggggaaataggctaaagaagggccacaggaatttgagccatcggcatcttactctgtttcacagctcgccttcccagtctgtcatgttggctccctggcaatttcatgggcaagggggcggggaggctttcactcgatgtgcctatgcatgacggacttaccaggtcaccagtgtagcagttcagggctctggagttgcattccttgatcggaactgaaagacctcccgcgatacctggcagaggcagtggctcttccctgtggtccagggctgcgtgactttgaaggtaatttcagtcaacccagcctttactgggctctgactgcattaggctgcatcaaaggggattggatcccatgattctttatatcttctgacattaagcctttgtcagctataggtgttacaaatatctttagtttgtggtttatcttttccccttttttatggtgtcttgaaggatagaagtcttttttttttttttttttttttttattgatcattcttgggtgtttctcgcagagggggatttggcagggtcataggacaacagtggagggaaggtcagcagataaacaagtgaacaaaggtctctggttttcctaggcagaggaccctgcggccttccgcagtgtttgtgtccctgggtacttgagattagggagtggtgatgactcttaacgagcatgctgccttcaagcatctgtttaacaaagcacatcttgcaccgcccttaatccatttaaccctgagtggacacagcacatgtttcagagagcacagggttggggataaggtcacagatcaacaggatcccaaggcagaagaatttttcttagtacagaacaaaatgaaaagtctcccatgtctacttctatccacacagacccggcaaccatccgatttctcaattttttccccacccttcccgcctttctattccacaaaactgccattgtcatcatggcccatccccaatgagccgctaggcacacctcccagacggggtcgtggccgggcagaggggctcctcacttcccagtaggggcggccgggcagaagcgccccccacctcccggatggggcggctggccgggcagaggggtcctcacttcccagtaggggcggccgggcagaggcgcccctcacctcccggatggggcggccggccgggcggggggctgacccccccacctccctcccggacagggcggctggccggaagtcttaatgcagacagcattatcagtgtgttcaaaagacacgtagacacgttttgcctatagacaaatgggcaaaaggaaacccagctttctcaaatgaagcacaagtgggccttaattatgtgaaaaggtgttcaagttcatcattaaacagggaaaggaaaagttaaaatcatgctgagatatctttcatagaaatggcaaaaagcaggaagtgccacgtgtgggcagagaggaagcacaggaactctcacaaatggcaggtgtcatcgtagaccaacacaaccactttggagagcagtttgactttccccagttaaactgaacatgtgagcggccgggcgtggtggctcatgcctgtaatcccagcagtttgggaggccgaggcgggcggattgcctgagctcaggagttcaagaccagccagggcaacacggtaaaaccccgtctctactaaaatacaaaaaattagctgggcgtgatggtgtgtgcctgtaatcccagctacttgtgaggccgaggcaggagaattgcttgaaccagggagcaggaggttgcagtgagccgagatcgcaccactgcaccccagcctgggcgacagagtccccctcccccaccaaaaaaacaacaagtgagcatcctgcaacctagcaatgccattgttgaacaagttcaaagatgttcttagccttattagtcccaaaaggaagaaaaaaatggaggatttgagaatgttcttagctttattgctaagcggagaaagaaaaacaacacataccaaaaaaaaaaaaaaaaaaaaaaaaaaaaaaaaaaaacctgggtgggaaattagggccatgtggcatgaaaaggaagacccaggggaagtgtggcccatctaggggtgtggctactgcagtgatccagctgtatcactgaacttccctggcatcatagagttatattgtgccatttatggaaaaactctccccactgctcttggctttgacagtaggaatcaggttatatatggtctctcggtttgaagatatttgtcattaaaaaccagaacaagggctctgagatagggtcctttcctgacctactctggtaaagtctttatcctcaggatgcaaggataccaccctcttcctgtggaaagtgtcgaatcacatgcagagctctaagtctttcagttactttggagtgcagaaccatttcaggtaaggccaaatattttaaacattagtataggaaattagagggctctttagtctgtgtgtgcatgagaagtaaaattgcacgagaagcaatttatgtaaaatttcgcttaggaaacattgttttggcaggttagtagtatggtgtgcatttcccagaaaattcagtgccgtgagtattacctttagttaagcatcttagaaatagtagctctttatggctaagtcagaaatactaccctcaaattctatgtgaccctagttatactgttgagcctttctgtgcctctgtgccttcatccttgaatcggggataatatacttacctcctaaggttattgtaaggattaaatgcatgtagtataaataaagagctgagaacaatgcatggcgtaaagtgataggtattattatatgcttttgttggctgttgattgaaggtgttcgctgttttgggggtgtcctttaatagagtaacttggtactgtggaaatagcatgattgtgagcaaaagaatcagatggtggtggctgcagactttgctgttcccttcttgactgttggttatagccaatgcagggtaagttataaagtcaagagcagagccgttttcacaatggacattgctttgtgatgtctgtgagcttgaatgtgagaatgattattttaattctctatgtaaggactttaaagtattggctattcggtagcttgaaaactctgtaatctcaatgctttaaactgagagtggaaaatcaataaagcaaaagcatgaggccacgcagtgtagaatgagtgtcttttcaccacgtagggaaatctgtagtcctaagaaaagagggagtgagaattctggcgaaaggattgtgcctctgcacaaagtgcaggatcccagggttcagtacaggcgcgaacgctcctgtgtgttgaccacactcccacggttgctttttcagacatgctgagggggactctactgtgcgcggtgctcgggcttctgcgcgcccagcccttcccctgtccgccagcttgcaagtgtgtcttccgggacgccgcgcagtgctcggggggcgacgtggcgcgcatctccgcgctgggcctgcccaccaacctcacgcacatcctgctcttcggaatgggccgcggcgtcctgcagagccagagcttcagcggcatgaccgtcctgcagcgcctcatgatctccgacagccacatttccgccgttgcccccggcaccttcagtgacctgataaaactgaaaaccctgaggctgtcgcgcaacaaaatcacgcatcttccaggtgcgctgctggataagatggtgctcctggagcagttgtttttggaccacaatgcgctaaggggcattgaccaaaacatgtttcagaaactggttaacctgcaggagctcgctctgaaccagaatcagctcgatttccttcctgccagtctcttcacgaatctggagaacctgaagttgttggatttatcgggaaacaacctgacccacctgcccaaggggttgcttggagcacaggctaagctcgagagacttctgctccactcgaaccgccttgtgtctctggattcggggctgttgaacagcctgggcgccctgacggagctgcagttccaccgaaatcacatccgttccatcgcacccggggccttcgaccggctcccaaacctcagttctttgacgctttcgagaaaccaccttgcgtttctcccctctgcgctctttcttcattcgcacaatctgactctgttgactctgttcgagaacccgctggcagagctcccgggggtgctcttcggggagatggggggcctgcaggagctgtggctgaaccgcacccagctgcgcaccctgcccgccgccgccttccgcaacctgagccgcctgcggtacttaggggtgactctgagcccgcggctgagcgcgcttccgcagggcgccttccagggccttggcgagctccaggtgctcgccctgcactccaacggcctgaccgccctccccgacggcttgctgcgcggcctcggcaagctgcgccaggtgtccctgcgccgcaacaggctgcgcgccctgccccgtgccctcttccgcaatctcagcagcctggagagcgtccagctcgaccacaaccagctggagaccctgcctggcgacgtgtttggggctctgccccggctgacggaggtcctgttggggcacaactcctggcgctgcgactgtggcctggggcccttcctggggtggctgcggcagcacctaggcctcgtgggcggggaagagcccccacggtgcgcaggccctggggcgcacgccggcctgccgctctgggccctgccggggggtgacgcggagtgcccgggcccccggggcccgcctccccgccccgctgcggacagctcctcggaagcccctgtccacccagccttggctcccaacagctcagaaccctgggtgtgggcccagccggtgaccacgggcaaaggtcaagatcatagtccgttctgggggttttattttctgcttttagctgttcaggccatgatcaccgtgatcatcgtgtttgctatgattaaaattggccaactctttcgaaaattaatcagagagagagcccttgggtaaaccaatgggaaaatcttctaattacttagaacctgaccagatgtggctcggaggggaatccagacccgctgctgtcttgctctccctcccctccccactcctcctctcttcttcctcttctctctcactgccacgccttcctttccctcctcctccccctctccgctctgtgctcttcattctcacaggcccgcaacccctcctctctgtgtcccccgcccgttcctggaaactgagcttgacgtttgtaaactgtggttgcctgccttccccagctcccacgcgggtgtgcgctgacactgccgggggcgctggactgtgttggacccatccgtgctccgctgtgcctggcttggcgtctggtggagagaggggcctcttcagtgtctactgagtaaggggacagctccaggccggggcctgtctcctgcacagagtaagccggtaaatgtttgtgaaatcaatgcgtggataaaggaacacatgccatccaagtgatgatggcttttcctggagggaaaggataggctgttgctctatctaattttttgtttttgtttttggacagtctagctctgtggcccaggctggcgtgcagtgggccgtctcagttcactgcagcctccgcctcccaggttcaagtgattctcatgcctcagcgttctgagtagctgggattagaggcgtgtgccactacacccggctaatttttgtactttttaaagtagagacggggctttgccatattggcctggctgatctcaaactcctggtcttgaactcctggccacaagtgatctgcccgccttggcctcccaaagtgctgggattacaggcgtaagccactacacctggccctcttcatcgaattttatttgagaagtagagctcttgccattttttcccttgctccatttttctcactttatgtctctctgacctatgggctacttgggagagcactggactccattcatgcatgagcattttcaggataagcgacttctgtgaggctgagagaggaagaaaacacggagccttccctccaggtgcccagtgtaggtccagcgtgtttcctgagcctcctgtgagtttccacttgctttacatccatgcaacatgtcattttgaaactggattgatttgcatttcctggaactctgccacctcatttcacaagcatttatggagcagttaacatgtgactggtattcatgaatataatgataagcttgattctagttcagctgctgtcacagtctcatttgttcttccaactgaaagccgtaaaacctttgttgctttaattgaatgtctgtgcttatgagaggcagtggttaaaacaggggctggcgagttgacaactgtgggttcaaatcccagctctaccacttactaactgcatgggactttgggtaagacacctgcttacattctctaagccttggtttcctgaaccttaaaacaggataacatagtacctgcttcgtagagtttttgtgagaattaaaggcaataaagcatataatgacttagcccagcggcctgcaggcaatacatgttaatgaatgttagctattattactaaaggatgagcaattattattggcatcatgatttctaaagaagagctttgagttggtatttttctctgtgtataagggtaagtccgaactttctcagactggaggttacattcacatcagtctgtcttcccctgcggatggcctcagccctgggtggccagactctgtgctcacaatccagagcaatggatcctccaacaccaccaggtggatgtggagcaggagagctggatcgtggcatttgtttctgggttctgcagctgtgggagttggtttctgggttctccattggtctacttgtctagtcccataccagactcacggtctccattattggagctttaataatttttggtatagggtcatctctccaccttgtttttcttctattcttggttctttgcaattctatgaatatttcagggtcagcatgtcaactccattgaaaaaccctgctgggattttaatagaacttacagctcacgcctgtaatctcagcactttgggaggctgaggtgggtggatcacaaggtcaggagtttgagaccagcctggccaagatggtaaaaccccgtctctactaaaaatacaaaaattagctgggtgcggtggcaggtgcctgtaatcccagctacttgggacactgaggcaggagaatcacttgaacccgggaggcggaggttgcagtgagccgagatcgtgccactgcactctagcctgggcgacagagcgagactccatctcaaaaaaaaaaaaaaaaaattgcagtaaatttaaaactaatttggggaagaatctgtattttttacaatacctagtgttcttgccagtaagcatggttcatcttcccatttatttacgtcattttaaatctttcagtgatgttttagaattttttttataaaaaccttcactataagaacagaaaaccaaacaccgcatgttctcactcataggtgggaattgaacaatgagaacacttggacacagggcggggaacgtcacacgcctggactgtcggggggtggggggctgggagagggatagtgttaggagaaatacctaatgtaaatgacgagttaatgggtgcagccaaccaacctggcacatgtattcatatgtaacaaacctgcacgttgtgcacatgtaccctagaacttaaagtatataaaaaaaagaaaccttgcactgattttgttagatttattcctaggtatccttcctcttttttgatttgtcattgctattgtagatggcatctttttaaaaagttatattttctaaagaaaaaaataaaaaaagttgtattttctaatttttattaccaatatataagaatgtaatttatttttacataattatcttatgtctagtaataattctgataatttgcttcttcctattaaaaccttacacccattattgatttatttttctgttttaaaatatcttcctgcactggctaaaacctccactataatgttgagcagaacagtgagcatccttagaactatcttggttgcaaagggtaggtctctaatgtttcatcaataaatgtgatgtttctagtctgagtttgctaagtatattttaaaataatcagtaaagttagattttatccatttttatcttaactattgagatgctcatatcatttttcttcttcaatgtgttaaaatggtgaataaatttatagattttggaaaagtaaattcattcttgcattcccgaagtaaaccaagccatgctatgtgtatttaaaatatattgctgaattcagcttgctgttttgtttagaacttttactatctgttcattagtgagatttgcttatacattgaaaataatatccttgactggttttggtatcaggttatacagcctcataaagtgggtggggacgttctctctggaatggttcgtaaaaactgggatcatcttttccttgaacgtgttgtagaatcccctggaaaaccttcgtggcctggttttattgtatgtgtgtattcggtatttattgttgcataaccagtaccccagatcttggtggtttaaaacaataaaatacattacgtcacagtttctgagggtcaagaatttgggagtagtttagttgagtggctgtggctcagggtctgtcatgaggttgccatcaaaatcttggctggggctctaatcatcatgactgcggctggaggatttgcttccgacatatcccgctcacgctgttggcagttccctggtggctcacggcaggcagccttgggtccttgccatatggaccccttgagtgtcctcatgacatggcagctggcttccccctttcgttcttcaaagaattgtgggg

SEQ ID NO: 3320 - DNA, 6886 bp, Homo sapiens
caggagatttatggttacaatttgagtcgctggaagcttgccatagtttctttaggagtgatttgctctggtgggtttctcctcctcctcctctattggatgcctgagtggcgggtgaaagcgacctgtgtcagagctgcaattaaagactgtgaagtagtgctgctgaggactactgatgaattcaaaatgtggttttgtgcaaaaattcgcgttctttctttggaaacttacccagtttcaagtccaaaatctatgtctaataagctttcaaatggccatgcagtttgtttaattgagaatcccactgaagaaaataggcacaggatcagtaaatattcacagactgaatcacaacagattcgttatttcacccaccatagtgtaaaatatttctggaatgataccattcacaattttgatttcttaaagggactggatgaaggtgtttcttgtacgtcaatttatgaaaagcatagtgcaggactgacaaaggggatgcatgcctacagaaaactgctttatggagtaaatgaaattgctgtaaaagtgccttctgtttttaagcttctaattaaagaggttctcaacccattttacattttccagctgttcagtgttatactgtggagcactgatgaatactattactatgctctagctattgtggttatgtccatagtatcaatcgtaagctcactatattccattagaaagcaatatgttatgttgcatgacatggtggcaactcatagtaccgtaagagtttcagtttgtagagtaaatgaagaaatagaagaaatcttttctaccgaccttgtgccaggagatgtcatggtcattccattaaatgggacaataatgccttgtgatgctgtgcttattaatggtacctgcattgtaaacgaaagcatgttaacaggagaaagtgttccagtgacaaagactaatttgccaaatccttcagtggatgtgaaaggaataggagatgaattatataatccagaaacacataaacgacatactttgttttgtgggacaactgttattcagactcgtttctacactggagaactcgtcaaagccatagttgttagaacaggatttagtacttccaaaggacagcttgttcgttccatattgtatcccaaaccaactgattttaaactctacagagatgcctacttgtttctactatgtcttgtggcagttgctggcattgggtttatctacactattattaatagcattttaaatgaggtacaagttggggtcataattatcgagtctcttgatattatcacaattactgtgccccctgcacttcctgctgcaatgactgctggtattgtgtatgctcagagaagactgaaaaaaatcggtattttctgtatcagtcctcaaagaataaatatttgtggacagctcaatcttgtttgctttgacaagactggaactctaactgaagatggtttagatctttgggggattcaacgagtggaaaatgcacgatttctttcaccagaagaaaatgtgtgcaatgagatgttggtaaaatcccagtttgttgcttgtatggctacttgtcattcacttacaaaaattgaaggagtgctctctggtgatccacttgatctgaaaatgtttgaggctattggatggattctggaagaagcaactgaagaagaaacagcacttcataatcgaattatgcccacagtggttcgtcctcccaaacaactgcttcctgaatctacccctgcaggaaaccaagaaatggagctgtttgaacttccagctacttatgagataggaattgttcgccagttcccattttcttctgctttgcaacgtatgagtgtggttgccagggtgctgggggataggaaaatggacgcctacatgaaaggagcgcccgaggccattgccggtctctgtaaacctgaaacagttcctgtcgattttcaaaacgttttggaagacttcactaaacagggcttccgtgtgattgctcttgcacacagaaaattggagtcaaaactgacatggcataaagtacagaatattagcagagatgcaattgagaacaacatggattttatgggattaattataatgcagaacaaattaaagcaagaaacccctgcagtacttgaagatttgcataaagccaacattcgcaccgtcatggtcacaggtgacagtatgttgactgctgtctctgtggccagagattgtggaatgattctacctcaggataaagtgattattgctgaagcattacctccaaaggatgggaaagttgccaaaataaattggcattatgcagactccctcacgcagtgcagtcatccatcagcaattgacccagaggctattccggttaaattggtccatgatagcttagaggatcttcaaatgactcgttatcattttgcaatgaatggaaaatcattctcagtgatactggagcattttcaagaccttgttcctaagttgatgttgcatggcaccgtgtttgcccgtatggcacctgatcagaagacacagttgatagaagcattgcaaaatgttgattattttgttgggatgtgtggtgatggcgcaaatgattgtggtgctttgaagagggcacacggaggcatttccttatcggagctcgaagcttcagtggcatctccctttacctctaagactcctagtatttcctgtgtgccaaaccttatcagggaaggccgtgctgctttaataacttccttctgtgtgtttaaattcatggcattgtacagcattatccagtacttcagtgttactctgctgtattctatcttaagtaacctaggagacttccagtttctcttcattgatctggcaatcattttggtagtggtatttacaatgagtttaaatcctgcctggaaagaacttgtggcacaaagaccaccttcgggtcttatatctggggcccttctcttctccgttttgtctcagattatcatctgcattggatttcaatctttgggttttttttgggtcaaacagcaaccttggtatgaagtgtggcatccaaaatcagatgcttgtaatacaacaggaagcgggttttggaattcttcacacgtagacaatgaaaccgaacttgatgaacataatatacaaaattatgaaaataccacagtgttttttatttccagttttcagtacctcatagtggcaattgccttttcaaaaggaaaacccttcaggcaaccttgctacaaaaattatttttttgttttttctgtgatttttttatatatttttatattattcatcatgttgtatccagttgcctctgttgaccaggttcttcagatagtgtgtgtaccatatcagtggcgtgtaactatgctcatcattgttcttgtcaatgcctttgtgtctatcacagtggagaacttcttccttgacatggtcctttggaaagttgtgttcaaccgagacaaacaaggagagtatcggttcagcaccacacagccaccgcaggagtcagtggatcggtggggaaaatgctgcttaccctgggccctgggctgtagaaagaagacaccaaaggcaaagtacatgtatctggcgcaggagctcttggttgatccagaatggccaccaaaacctcagacaaccacagaagctaaagctttagttaaggagaatggatcatgtcaaatcatcaccataacatagcagtgaatcagtctcagtggtattgctgatagcagtattcaggaatatgtgattttaggagtttctgatcctgtgtgtcagaatggcactagttcagtttatgtcccttctgatatagtagcttatttgacagctttgctcttccttaaaataaaaacagaaaaatatatcgtcctaacagttaaattaacaatcaatccataaagtcctatatcttcattcagcaacccaaatattacatacatttccagaattttcttgattgttactttcagtgatattctttatattgggtacaggagaagtttggtgtttggtaggtttttcaacattagtttttgagactagtttacctcttcacatttatgctcacaaccctcttgttagaaaagtctgtgtttatatacaggctgtaagtttgtgattgataaaaagaagatgagtgttaattagcctccagtgaaaatatactgaaagcctgttttcatttgattccaatgtttcttccaaagaattctgtataaacatatgccaattccctatgatggtctagagttaggaatgagtgtttatggtgttgcttatagaacaactcaggtaatctccatttctggttttatattttctgtacaaactgcctgggttttatttttctaatcagcaaggtgcttcactgccttcttgagacgcctctcaaagctcttaaatggctcctgtgctatgtgtggtgttggcagtctaatttgcttctgttaaatgttgtagaacctttttcactaggaaataagattcatttctttcggcagtagatgtagattcatcttttaacgtttcttcaaatttgtttctgtcaggctttgtgttattttaaatggttttttaaaattttcttctatgttttcaattacctaaagacataggataatagttttttttaagttagaattttacctcataaaattttttgaggtttgatgtatgtctctgtcttatcaataatgaggcttaaaaaatactggatttgaatggctgccgttttttcaaagcaatatgaatttgatgagtttgttttatgccattaggtggcgccagaggtcagaacatgtctattttgaattggatcgttacaaatgagcatatttgatgcggaaatttctgggagaaaaaaaattgaggaaataaagttaaaaaattgacattcattgagccaaaagagatgtggagaaacatttttcacctttctgtttggcctgattaacatttaaattcttgccaaaattaaggtaacttttaaaaaacaccttttataggtggatccagcagtctggcaacgcccacagttaccacaacacagaaaactgatcgtgctataaaatggacgctaaactatgaaaacagtgtgacattgttctctgttcttccagagccagtaacatgcttgctcgtgctttctacttctagctgatcattcttttcccaacatatatttacaaatttaccaaattttacctagaattttaggaccaaatggttctcactctttatgctgcaaagacctggatgatgtttggtaactatagaaaaatagaaattacactcaggatcactgttactgctattgccactgatgattcctgcaaaaatataatcgaagttttccatcaaatgtataatatgctattaatacacattagatgataacagttgttccatgaatgattctatgaagctatgcatcttagacctcttgagctgtgaattagcactattttctatagttacttattctctggatcattttataatttccatattaatttcaaatatgctcgtgttattcttcagtgatttccacaattgtgcattttattctttggtttaagtactgaagcatataatgaaagtaattgctaagtagcagcttaaaaattcaattatccgattgtatttaacatctttaagagcatgatcataaagagctatttttgacaccccccccccacttttttaacatttagagttagtaagggttttatatctcttctgtccatattgcgttgagaatgttatttgaagaatgcctgtgaagccaggtgtgggttctactcagtgccatagatagactgagtcttctctcgtaggttaccattacatagtaattttgattctgaatttcacattaaattatttgagtttatacagacctaaattttaaaatctgtacatatattattttgatgtattaagatgaatattgctgatttaaattttatttatgcacatacttaaaggacagaaatgtctgggaaagtaattgttaaataatgatatgtaactttttaactttttaaataaataacaagatttttaatgtgtgtctccctcagggttgtttaaagttttttttctccctcaagtataaatagtggtaactatatgttttgtatcttctagcaccaactgctgtaaagcaatgctgcaaataatgcttgaatacaagtggctaagccaacaacagaataaatacttttatagtagttttataatcctgaaattcgaaagctttcccaattgcacttgcatctaaacaaaactgttgcagtttttactctatttattttgttccccatgtttatgaaagtcctgcacagtttcaaaggcatggtaaataatatatcaatgtttatgtagtctgttacagaaacagctatagataacattatccagtgaagagcaaaattcaagctttagaaaatattcatgcatgcaattttgacatatctaaaaataggtttttgtatatttatggtgggaggtggttgggaacttttaacaaaatggggtgttaatttttgtacagtctgtgggcatttacacatttttaatgtattaaaatttggtaattatgtgtacattaaattaataaaagttacttctagttatgatttgtgaattccctaagaccttggatttttttaagtaactttatatcagaaatgatactgcatctttatatttttaaaattgtattgctgctcaagaatggtaccctcttgtcaaaaaggcatacattcataattgtacattcagcattgtaaataatcttatgaaaccttttttgattgaagctattcaaaataaaaattttaatgaatgaaataac

SEQ ID NO: 3321 - protein, 1191 aa, Homo sapiens
MPEWRVKATCVRAAIKDCEVVLLRTTDEFKMWFCAKIRVLSLETYPVSSPKSMSNKLSNGHAVCLIENPTEENRHRISKYSQTESQQIRYFTHHSVKYFWNDTIHNFDFLKGLDEGVSCTSIYEKHSAGLTKGMHAYRKLLYGVNEIAVKVPSVFKLLIKEVLNPFYIFQLFSVILWSTDEYYYYAIVVMSIVSIVSSKIRKQYVMLHDMVATHSTVRVSVCRVNEEIEEIFSTDLVPGDVMVIPLNGTIMPCDAVLINGTCIVNESMLTGESVPVTKTNLPNPSVDVKGIGDELYNPETHKRHTLFCGTTVIQTRFYTGELVKAIVVRTGFSTSKGQLVRSILYPKPTDFKLYRDAYLFLLCLVAVAGIGFIYTIINSILNEVQVGVIIIESLDIITITVPPALPAAMTAGIVYAQRRLKKIGIFCISPQRINICGQLNLVCFDKTGTLTEDGLDLWGIQRVENARFLSPEENVCNEMLVKSQFVACMATCHSLTKIEGVLSGDPLDLKMFEAIGWIEATEEETALHNRIMPTVVRPPKQLLPESTPAGNQEMELFELPATYEIGIVRQFPFSSALQRMSVVARVLGDRKMDAYMKGAPEAIAGLCKPETVPVDFQNVLEDFTKQGFRVIAHRKLESKLTWHKVQNISRDAIENNMDFMGLIIMQNKLKQETPAVLEDLHKANIRTVMVTGDSMLTAVSVARDCGMILPQDKVIIAEALPPKDGKVAKINWHYADSLTQCSHPSAIDPEAIPVKLVHDSLEDLQMTRYHFAMNGKSFSVIHFQDLVPKLMLHGTVFARMAPDQKTQLIEALQNVDYFVGMCGDGANDCGALKRAHGGISLSELEASVDFTSKTPSISCVPNLIREGRAALITSFCVFKFMAKIIQYFSVTLKILSNLGDFQFLFIDLAIILVVVFTMSLNPAWKELVAQRPPSGLISGALLFSVLSQIIICIGFQSLGFFWVKQQPWYEVWHPKSDACNTTGSGFWNSSHVDNETELDEHNIQNYENTTVFFISSFQYLIVAIAFSKGKPFRQPCYKNYFFVFSVIFLYIFILFIMLYPVASVDQVLQIVCVPYQWRVTMLIIVLVNAFVSITVENFFLDMVLWKVVFNRDKQGEYRFSTTQPPQESVDRWGKCCLPWALGCRKKTPKAKYMYLAQELLVDPEWPPKPQTTTEAKALVKENGSCQIITIT

SEQ ID NO: 3322 - DNA, 5712 bp, Homo sapiens
ataaatgatggatagctctctgaagcatgttagggatttgggctcagtccaaaagacagtggaaagccattgaaggctattattattaatttattttattttattttattttttcgatagagtctccttcccaggctggagtgcagtggcaatcttggctcactgcaacctccgcctcccaggttcaaggaattcttgtgcctcagcctcctgagtagccgggattagaggcatgtgccaccacgcccagccagttttttgtatttttagtagaaacagggtgttaccatgttggccaggctggtctctaactctgggtctgaagtgatccacccgccttggccttccagagtgctgggattacaggcgtacacaccatcacacccagctaatttttgtgtttttagtagaaacagtgtcaaccttgttggccaggctggtttggtactcctggcctcaagtgatctgcccgccttggcctcccagagtgctgggattactggcatgagccaccatgcatagccaccattgaagggttttaagcagaggagtgataaaatacttgccctttggaaaaaaatcattctggcgtccacattcagactggtttagaggagagtaatactgaagacatgcccccccgaatcaaggtagcaattgcggagatgaaaagaaatgagttcaaaagatacttaaatgtgaccattgaacaggatttgactcattggatatgaggccatggagcagtgtctggctaggtggatggatgttggtgctgtttagttaaataggaaactggaagagaagcaggcttgcaagaatggtaatattttggacgtgtaacttgtctggcaagatgttgaagaggtaaaggaggcagcacagcatcatgggccttggaggcagaagccgctttgatttactcagaacaccaaatcagtctccattttcttgactcagactacacccaagagattgcttccttccctgtgcttcctggccacttgctactctagctaggaagatctgcctcccttagctgaagtctaagatgtgtagcttattgatgcctctcctcttcttgttctgctgttgctgaatataatggggatgccagggcagacataccattcaacttgaatcttccttacccactttgtatagtcttacatgtcattgataccttgttttctggtacgcctaaaaggagtagaacttcaagtggtatttaaaagctttaagaaaagtcaaatttttacttttttcttcccatctgaggaatggatttattttctttttaaagaaatccaaatttttaaaagaagggatcttatttttaaaacgaagatcgataatatctactatgtactaaatgtcattctttaaaagttgttccctcataatttagtaaattacttccttttttaaaaaaaggaaagaaagagtgtttgtcttacaggctaacatcacaaacaataagtttcttctcatccatctccatttataaactagtgtgactgtcttctgagcacagtattaaacctggacagggagagggagggtgttagagaatgagaggaaaagagagagaatacctacatataaggtgaccctaaagaaaagcctttcacccttcggaagatcttttcattttcatttttctttttttcaaacaccaacttgtaccagagggaagatctttttttaaaagtgtttcactaaaatttgtaaggaaataatgagctagataaaatattacagtgtttatttaatgaatttactcatatttaaaataatatctaaaaagagtaatttaggaatattgaggcaatgagacttgaaggttataaatagtggcagtgagaaaaggaatattatagataagctgttgaaaagaaaagatgctaagttttctagtgcttccttctgtttccaagggattatagaaatcggagtttgtttgacctgtttcacaggcatctcctttgtggactcattgtgtctcttccttaggctaatagtcaccatttatcatggacggttgtcatgagtgttgaagcacacttaacctgcttcgtcagagggtacttggcatcaccggtgcacagctggtgtcctagcaggagactaactagctgacacaccgtgctttgttagcctaataatcttatttgttaaaacttgccatttgttggatttttctattttaccccattataaacttcttattgagatcagatgacttctgaatagcatttgctgtatttttccaaggtaaagaatatctttttcagatttttctttctttctttaatttcagaaatagaagaaatcttttctaccgaccttgtgccaggagatgtcatggtcattccattaaatgggacaataatgccttgtgatgctgtgcttattaatggtacctgcattgtaaacgaaagcatgttaacaggagaaagtgttccagtgacaaagactaatttgccaaatccttcagtggatgtgaaaggaataggagatgaattatataatccagaaacacataaacgacatactttgttttgtgggacaactgttattcagactcgtttctacactggagaactcgtcaaagccatagttgttagaacaggatttagtacttccaaaggacagcttgttcgttccatattgtatcccaaaccaactgattttaaactctacagagatgcctacttgtttctactatgtcttgtggcagttgctggcattgggtttatctacactattattaatagcattttaaatgaggtacaagttggggtcataattatcgagtctcttgatattatcacaattactgtgccccctgcacttcctgctgcaatgactgctggtattgtgtatgctcagagaagactgaaaaaaatcggtattttctgtatcagtcctcaaagaataaatatttgtggacagctcaatcttgtttgctttgacaagactggaactctaactgaagatggtttagatctttgggggattcaacgagtggaaaatgcacgatttctttcaccagaagaaaatgtgtgcaatgagatgttggtaaaatcccagtttgttgcttgtatggctacttgtcattcacttacaaaaattgaaggagtgctctctggtgatccacttgatctgaaaatgtttgaggctattggatggattctggaagaagcaactgaagaagaaacagcacttcataatcgaattatgcccacagtggttcgtcctcccaaacaactgcttcctgaatctacccctgcaggaaaccaagaaatggagctgtttgaacttccagctacttatgagataggaattgttcgccagttcccattttcttctgctttgcaacgtatgagtgtggttgccagggtgctgggggataggaaaatggacgcctacatgaaaggagcgcccgaggccattgccggtctctgtaaacctgaaacagttcctgtcgattttcaaaacgttttggaagacttcactaaacagggcttccgtgtgattgctcttgcacacagaaaattggagtcaaaactgacatggcataaagtacagaatattagcagagatgcaattgagaacaacatggattttatgggattaattataatgcagaacaaattaaagcaagaaacccctgcagtacttgaagatttgcataaagccaacattcgcaccgtcatggtcacaggtgacagtatgttgactgctgtctctgtggccagagattgtggaatgattctacctcaggataaagtgattattgctgaagcattacctccaaaggatgggaaagttgccaaaataaattggcattatgcagactccctcacgcagtgcagtcatccatcagcaattgacccagaggctattccggttaaattggtccatgatagcttagaggatcttcaaatgactcgttatcattttgcaatgaatggaaaatcattctcagtgatactggagcattttcaagaccttgttcctaagttgatgttgcatggcaccgtgtttgcccgtatggcacctgatcagaagacacagttgatagaagcattgcaaaatgttgattattttgttgggatgtgtggtgatggcgcaaatgattgtggtgctttgaagagggcacacggaggcatttccttatcggagctcgaagcttcagtggcatctccctttacctctaagactcctagtatttcctgtgtgccaaaccttatcagggaaggccgtgctgctttaataacttccttctacctcttgagctgtgaattagcactattttctatagttacttattctctggatcattttataatttccatattaatttcaaatatgctcgtgttattcttcagtgatttccacaattgtgcattttattctttggtttaagtactgaagcatataatgaaagtaattgctaagtagcagcttaaaaattcaattatccgattgtatttaacatctttaagagcatgatcataaagagctatttttgacaccccccccccacttttttaacatttagagttagtaagggttttatatctcttctgtccatattgcgttgagaatgttatttgaagaatgcctgtgaagccaggtgtgggttctactcagtgccatagatagactgagtcttctctcgtaggttaccattacatagtaattttgattctgaatttcacattaaattatttgagtttatacagacctaaattttaaaatctgtacatatattattttgatgtattaagatgaatattgctgatttaaattttatttatgcacatacttaaaggacagaaatgtctgggaaagtaattgttaaataatgatatgtaactttttaactttttaaataaataacaagatttttaatgtgtgtctccctcagggttgtttaaagttttttttctccctcaagtataaatagtggtaactatatgttttgtatcttctagcaccaactgctgtaaagcaatgctgcaaataatgcttgaatacaagtggctaagccaacaacagaataaatacttttatagtagttttataatcctgaaattcgaaagctttcccaattgcacttgcatctaaacaaaactgttgcagtttttactctatttattttgttccccatgtttatgaaagtcctgcacagtttcaaaggcatggtaaataatatatcaatgtttatgtagtctgttacagaaacagctatagataacattatccagtgaagagcaaaattcaagctttagaaaatattcatgcatgcaattttgacatatctaaaaataggtttttgtatatttatggtgggaggtggttgggaacttttaacaaaatggggtgttaatttttgtacagtctgtgggcatttacacatttttaatgtattaaaatttggtaattatgtgtacattaaattaataaaagttacttctagttatgatttgtgaattccctaagaccttggatttttttaagtaactttatatcagaaatgatactgcatctttatatttttaaaattgtattgctgctcaagaatggtaccctcttgtcaaaaaggcatacattcataattgtacattcagcattgtaaataatcttatgaaaccttttttgattgaagctattcaaaataaaaattttaatgaatgaaataac

SEQ ID NO: 3323 - protein, 680 aa, Homo sapiens
MVIPLNGTIMPCDAVLINGTCIVNESMLTGESVPVTKTNLPNPSVDVKGIGDELYNPETHKRHTLFCGTTVIQTRFYTGELVKAIVVRTGFSTSKGQLVRSILYPKPTDFKLYRDAYLFLLCLVAVAGIGFIYTIINSILNEVQVGVIIIESLDIITITVPPALPAAMTAGIVYAQRRLKKIGIFCISPQRINICGQLNLVCFDKTGTLTEDGLDLWGIQRVENARFLSPEENVCNEMLVKSQFVACMATCHSLTKIEGVLSGDPLDLKMFEAIGWIEATEEETALHNRIMPTVVRPPKQLLPESTPAGNQEMELFELPATYEIGIVRQFPFSSALQRMSVVARVLGDRKMDAYMKGAPEAIAGLCKPETVPVDFQNVLEDFTKQGFRVIAHRKLESKLTWHKVQNISRDAIENNMDFMGLIIMQNKLKQETPAVLEDLHKANIRTVMVTGDSMLTAVSVARDCGMILPQDKVIIAEALPPKDGKVAKINWHYADSLTQCSHPSAIDPEAIPVKLVHDSLEDLQMTRYHFAMNGKSFSVIHFQDLVPKLMLHGTVFARMAPDQKTQLIEALQNVDYFVGMCGDGANDCGALKRAHGGISLSELEASVDFTSKTPSISCVPNLIREGRAALITSFYLLSCELALFSIVTYSLDHFIISILISNMLVLFFSDFHNCAFYSLV

SEQ ID NO: 3324 - DNA, 8499 bp, Homo sapiens
ataaatgatggatagctctctgaagcatgttagggatttgggctcagtccaaaagacagtggaaagccattgaaggctattattattaatttattttattttattttattttttcgatagagtctccttcccaggctggagtgcagtggcaatcttggctcactgcaacctccgcctcccaggttcaaggaattcttgtgcctcagcctcctgagtagccgggattagaggcatgtgccaccacgcccagccagttttttgtatttttagtagaaacagggtgttaccatgttggccaggctggtctctaactctgggtctgaagtgatccacccgccttggccttccagagtgctgggattacaggcgtacacaccatcacacccagctaatttttgtgtttttagtagaaacagtgtcaaccttgttggccaggctggtttggtactcctggcctcaagtgatctgcccgccttggcctcccagagtgctgggattactggcatgagccaccatgcatagccaccattgaagggttttaagcagaggagtgataaaatacttgccctttggaaaaaaatcattctggcgtccacattcagactggtttagaggagagtaatactgaagacatgcccccccgaatcaaggtagcaattgcggagatgaaaagaaatgagttcaaaagatacttaaatgtgaccattgaacaggatttgactcattggatatgaggccatggagcagtgtctggctaggtggatggatgttggtgctgtttagttaaataggaaactggaagagaagcaggcttgcaagaatggtaatattttggacgtgtaacttgtctggcaagatgttgaagaggtaaaggaggcagcacagcatcatgggccttggaggcagaagccgctttgatttactcagaacaccaaatcagtctccattttcttgactcagactacacccaagagattgcttccttccctgtgcttcctggccacttgctactctagctaggaagatctgcctcccttagctgaagtctaagatgtgtagcttattgatgcctctcctcttcttgttctgctgttgctgaatataatggggatgccagggcagacataccattcaacttgaatcttccttacccactttgtatagtcttacatgtcattgataccttgttttctggtacgcctaaaaggagtagaacttcaagtggtatttaaaagctttaagaaaagtcaaatttttacttttttcttcccatctgaggaatggatttattttctttttaaagaaatccaaatttttaaaagaagggatcttatttttaaaacgaagatcgataatatctactatgtactaaatgtcattctttaaaagttgttccctcataatttagtaaattacttccttttttaaaaaaaggaaagaaagagtgtttgtcttacaggctaacatcacaaacaataagtttcttctcatccatctccatttataaactagtgtgactgtcttctgagcacagtattaaacctggacagggagagggagggtgttagagaatgagaggaaaagagagagaatacctacatataaggtgaccctaaagaaaagcctttcacccttcggaagatcttttcattttcatttttctttttttcaaacaccaacttgtaccagagggaagatctttttttaaaagtgtttcactaaaatttgtaaggaaataatgagctagataaaatattacagtgtttatttaatgaatttactcatatttaaaataatatctaaaaagagtaatttaggaatattgaggcaatgagacttgaaggttataaatagtggcagtgagaaaaggaatattatagataagctgttgaaaagaaaagatgctaagttttctagtgcttccttctgtttccaagggattatagaaatcggagtttgtttgacctgtttcacaggcatctcctttgtggactcattgtgtctcttccttaggctaatagtcaccatttatcatggacggttgtcatgagtgttgaagcacacttaacctgcttcgtcagagggtacttggcatcaccggtgcacagctggtgtcctagcaggagactaactagctgacacaccgtgctttgttagcctaataatcttatttgttaaaacttgccatttgttggatttttctattttaccccattataaacttcttattgagatcagatgacttctgaatagcatttgctgtatttttccaaggtaaagaatatctttttcagatttttctttctttctttaatttcagaaatagaagaaatcttttctaccgaccttgtgccaggagatgtcatggtcattccattaaatgggacaataatgccttgtgatgctgtgcttattaatggtacctgcattgtaaacgaaagcatgttaacaggagaaagtgttccagtgacaaagactaatttgccaaatccttcagtggatgtgaaaggaataggagatgaattatataatccagaaacacataaacgacatactttgttttgtgggacaactgttattcagactcgtttctacactggagaactcgtcaaagccatagttgttagaacaggatttagtacttccaaaggacagcttgttcgttccatattgtatcccaaaccaactgattttaaactctacagagatgcctacttgtttctactatgtcttgtggcagttgctggcattgggtttatctacactattattaatagcattttaaatgaggtacaagttggggtcataattatcgagtctcttgatattatcacaattactgtgccccctgcacttcctgctgcaatgactgctggtattgtgtatgctcagagaagactgaaaaaaatcggtattttctgtatcagtcctcaaagaataaatatttgtggacagctcaatcttgtttgctttgacaagactggaactctaactgaagatggtttagatctttgggggattcaacgagtggaaaatgcacgatttctttcaccagaagaaaatgtgtgcaatgagatgttggtaaaatcccagtttgttgcttgtatggctacttgtcattcacttacaaaaattgaaggagtgctctctggtgatccacttgatctgaaaatgtttgaggctattggatggattctggaagaagcaactgaagaagaaacagcacttcataatcgaattatgcccacagtggttcgtcctcccaaacaactgcttcctgaatctacccctgcaggaaaccaagaaatggagctgtttgaacttccagctacttatgagataggaattgttcgccagttcccattttcttctgctttgcaacgtatgagtgtggttgccagggtgctgggggataggaaaatggacgcctacatgaaaggagcgcccgaggccattgccggtctctgtaaacctgaaacagttcctgtcgattttcaaaacgttttggaagacttcactaaacagggcttccgtgtgattgctcttgcacacagaaaattggagtcaaaactgacatggcataaagtacagaatattagcagagatgcaattgagaacaacatggattttatgggattaattataatgcagaacaaattaaagcaagaaacccctgcagtacttgaagatttgcataaagccaacattcgcaccgtcatggtcacaggtgacagtatgttgactgctgtctctgtggccagagattgtggaatgattctacctcaggataaagtgattattgctgaagcattacctccaaaggatgggaaagttgccaaaataaattggcattatgcagactccctcacgcagtgcagtcatccatcagcaattgacccagaggctattccggttaaattggtccatgatagcttagaggatcttcaaatgactcgttatcattttgcaatgaatggaaaatcattctcagtgatactggagcattttcaagaccttgttcctaagttgatgttgcatggcaccgtgtttgcccgtatggcacctgatcagaagacacagttgatagaagcattgcaaaatgttgattattttgttgggatgtgtggtgatggcgcaaatgattgtggtgctttgaagagggcacacggaggcatttccttatcggagctcgaagcttcagtggcatctccctttacctctaagactcctagtatttcctgtgtgccaaaccttatcagggaaggccgtgctgctttaataacttccttctgtgtgtttaaattcatggcattgtacagcattatccagtacttcagtgttactctgctgtattctatcttaagtaacctaggagacttccagtttctcttcattgatctggcaatcattttggtagtggtatttacaatgagtttaaatcctgcctggaaagaacttgtggcacaaagaccaccttcgggtcttatatctggggcccttctcttctccgttttgtctcagattatcatctgcattggatttcaatctttgggttttttttgggtcaaacagcaaccttggtatgaagtgtggcatccaaaatcagatgcttgtaatacaacaggaagcgggttttggaattcttcacacgtagacaatgaaaccgaacttgatgaacataatatacaaaattatgaaaataccacagtgttttttatttccagttttcagtacctcatagtggcaattgccttttcaaaaggaaaacccttcaggcaaccttgctacaaaaattatttttttgttttttctgtgatttttttatatatttttatattattcatcatgttgtatccagttgcctctgttgaccaggttcttcagatagtgtgtgtaccatatcagtggcgtgtaactatgctcatcattgttcttgtcaatgcctttgtgtctatcacagtggagaacttcttccttgacatggtcctttggaaagttgtgttcaaccgagacaaacaaggagagtatcggttcagcaccacacagccaccgcaggagtcagtggatcggtggggaaaatgctgcttaccctgggccctgggctgtagaaagaagacaccaaaggcaaagtacatgtatctggcgcaggagctcttggttgatccagaatggccaccaaaacctcagacaaccacagaagctaaagctttagttaaggagaatggatcatgtcaaatcatcaccataacatagcagtgaatcagtctcagtggtattgctgatagcagtattcaggaatatgtgattttaggagtttctgatcctgtgtgtcagaatggcactagttcagtttatgtcccttctgatatagtagcttatttgacagctttgctcttccttaaaataaaaacagaaaaatatatcgtcctaacagttaaattaacaatcaatccataaagtcctatatcttcattcagcaacccaaatattacatacatttccagaattttcttgattgttactttcagtgatattctttatattgggtacaggagaagtttggtgtttggtaggtttttcaacattagtttttgagactagtttacctcttcacatttatgctcacaaccctcttgttagaaaagtctgtgtttatatacaggctgtaagtttgtgattgataaaaagaagatgagtgttaattagcctccagtgaaaatatactgaaagcctgttttcatttgattccaatgtttcttccaaagaattctgtataaacatatgccaattccctatgatggtctagagttaggaatgagtgtttatggtgttgcttatagaacaactcaggtaatctccatttctggttttatattttctgtacaaactgcctgggttttatttttctaatcagcaaggtgcttcactgccttcttgagacgcctctcaaagctcttaaatggctcctgtgctatgtgtggtgttggcagtctaatttgcttctgttaaatgttgtagaacctttttcactaggaaataagattcatttctttcggcagtagatgtagattcatcttttaacgtttcttcaaatttgtttctgtcaggctttgtgttattttaaatggttttttaaaattttcttctatgttttcaattacctaaagacataggataatagttttttttaagttagaattttacctcataaaattttttgaggtttgatgtatgtctctgtcttatcaataatgaggcttaaaaaatactggatttgaatggctgccgttttttcaaagcaatatgaatttgatgagtttgttttatgccattaggtggcgccagaggtcagaacatgtctattttgaattggatcgttacaaatgagcatatttgatgcggaaatttctgggagaaaaaaaattgaggaaataaagttaaaaaattgacattcattgagccaaaagagatgtggagaaacatttttcacctttctgtttggcctgattaacatttaaattcttgccaaaattaaggtaacttttaaaaaacaccttttataggtggatccagcagtctggcaacgcccacagttaccacaacacagaaaactgatcgtgctataaaatggacgctaaactatgaaaacagtgtgacattgttctctgttcttccagagccagtaacatgcttgctcgtgctttctacttctagctgatcattcttttcccaacatatatttacaaatttaccaaattttacctagaattttaggaccaaatggttctcactctttatgctgcaaagacctggatgatgtttggtaactatagaaaaatagaaattacactcaggatcactgttactgctattgccactgatgattcctgcaaaaatataatcgaagttttccatcaaatgtataatatgctattaatacacattagatgataacagttgttccatgaatgattctatgaagctatgcatcttagacctcttgagctgtgaattagcactattttctatagttacttattctctggatcattttataatttccatattaatttcaaatatgctcgtgttattcttcagtgatttccacaattgtgcattttattctttggtttaagtactgaagcatataatgaaagtaattgctaagtagcagcttaaaaattcaattatccgattgtatttaacatctttaagagcatgatcataaagagctatttttgacaccccccccccacttttttaacatttagagttagtaagggttttatatctcttctgtccatattgttttcaaaggaatgaggtgtttaggtggctggaaaagcatttgtaggaagttagatttgaatatagacaaggtgggttattcacgttgagaatgttatttgaagaatgcctgtgaagccaggtgtgggttctactcagtgccatagatagactgagtcttctctcgtaggttaccattacatagtaattttgattctgaatttcacattaaattatttgagtttatacagacctaaattttaaaatctgtacatatattattttgatgtattaagatgaatattgctgatttaaattttatttatgcacatacttaaaggacagaaatgtctgggaaagtaattgttaaataatgatatgtaactttttaactttttaaataaataacaagatttttaatgtgtgtctccctcagggttgtttaaagttttttttctccctcaagtataaatagtggtaactatatgttttgtatcttctagcaccaactgctgtaaagcaatgctgcaaataatgcttgaatacaagtggctaagccaacaacagaataaatacttttatagtagttttataatcctgaaattcgaaagctttcccaattgcacttgcatctaaacaaaactgttgcagtttttactctatttattttgttccccatgtttatgaaagtcctgcacagtttcaaaggcatggtaaataatatatcaatgtttatgtagtctgttacagaaacagctatagataacattatccagtgaagagcaaaattcaagctttagaaaatattcatgcatgcaattttgacatatctaaaaataggtttttgtatatttatggtgggaggtggttgggaacttttaacaaaatggggtgttaatttttgtacagtctgtgggcatttacacatttttaatgtattaaaatttggtaattatgtgtacattaaattaataaaagttacttctagttatgatttgtgaattccctaagaccttggatttttttaagtaactttatatcagaaatgatactgcatctttatatttttaaaattgtattgctgctcaagaatggtaccctcttgtcaaaaaggcatacattcataattgtacattcagcattgtaaataatcttatgaaaccttttttgattgaagctattcaaaataaaaattttaatgaatgaaataac

SEQ ID NO: 3325 - protein, 950 aa, Homo sapiens
MVIPLNGTIMPCDAVLINGTCIVNESMLTGESVPVTKTNLPNPSVDVKGIGDELYNPETHKRHTLFCGTTVIQTRFYTGELVKAIVVRTGFSTSKGQLVRSILYPKPTDFKLYRDAYLFLLCLVAVAGIGFIYTIINSILNEVQVGVIIIESLDIITITVPPALPAAMTAGIVYAQRRLKKIGIFCISPQRINICGQLNLVCFDKTGTLTEDGLDLWGIQRVENARFLSPEENVCNEMLVKSQFVACMATCHSLTKIEGVLSGDPLDLKMFEAIGWIEATEEETALHNRIMPTVVRPPKQLLPESTPAGNQEMELFELPATYEIGIVRQFPFSSALQRMSVVARVLGDRKMDAYMKGAPEAIAGLCKPETVPVDFQNVLEDFTKQGFRVIAHRKLESKLTWHKVQNISRDAIENNMDFMGLIIMQNKLKQETPAVLEDLHKANIRTVMVTGDSMLTAVSVARDCGMILPQDKVIIAEALPPKDGKVAKINWHYADSLTQCSHPSAIDPEAIPVKLVHDSLEDLQMTRYHFAMNGKSFSVIHFQDLVPKLMLHGTVFARMAPDQKTQLIEALQNVDYFVGMCGDGANDCGALKRAHGGISLSELEASVDFTSKTPSISCVPNLIREGRAALITSFCVFKFMAKIIQYFSVTLKILSNLGDFQFLFIDLAIILVVVFTMSLNPAWKELVAQRPPSGLISGALLFSVLSQIIICIGFQSLGFFWVKQQPWYEVWHPKSDACNTTGSGFWNSSHVDNETELDEHNIQNYENTTVFFISSFQYLIVAIAFSKGKPFRQPCYKNYFFVFSVIFLYIFILFIMLYPVASVDQVLQIVCVPYQWRVTMLIIVLVNAFVSITVENFFLDMVLWKVVFNRDKQGEYRFSTTQPPQESVDRWGKCCLPWALGCRKKTPKAKYMYLAQELLVDPEWPPKPQTTTEAKALVKENGSCQIITIT

SEQ ID NO: 3326 - DNA, 5785 bp, Homo sapiens
ataaatgatggatagctctctgaagcatgttagggatttgggctcagtccaaaagacagtggaaagccattgaaggctattattattaatttattttattttattttattttttcgatagagtctccttcccaggctggagtgcagtggcaatcttggctcactgcaacctccgcctcccaggttcaaggaattcttgtgcctcagcctcctgagtagccgggattagaggcatgtgccaccacgcccagccagttttttgtatttttagtagaaacagggtgttaccatgttggccaggctggtctctaactctgggtctgaagtgatccacccgccttggccttccagagtgctgggattacaggcgtacacaccatcacacccagctaatttttgtgtttttagtagaaacagtgtcaaccttgttggccaggctggtttggtactcctggcctcaagtgatctgcccgccttggcctcccagagtgctgggattactggcatgagccaccatgcatagccaccattgaagggttttaagcagaggagtgataaaatacttgccctttggaaaaaaatcattctggcgtccacattcagactggtttagaggagagtaatactgaagacatgcccccccgaatcaaggtagcaattgcggagatgaaaagaaatgagttcaaaagatacttaaatgtgaccattgaacaggatttgactcattggatatgaggccatggagcagtgtctggctaggtggatggatgttggtgctgtttagttaaataggaaactggaagagaagcaggcttgcaagaatggtaatattttggacgtgtaacttgtctggcaagatgttgaagaggtaaaggaggcagcacagcatcatgggccttggaggcagaagccgctttgatttactcagaacaccaaatcagtctccattttcttgactcagactacacccaagagattgcttccttccctgtgcttcctggccacttgctactctagctaggaagatctgcctcccttagctgaagtctaagatgtgtagcttattgatgcctctcctcttcttgttctgctgttgctgaatataatggggatgccagggcagacataccattcaacttgaatcttccttacccactttgtatagtcttacatgtcattgataccttgttttctggtacgcctaaaaggagtagaacttcaagtggtatttaaaagctttaagaaaagtcaaatttttacttttttcttcccatctgaggaatggatttattttctttttaaagaaatccaaatttttaaaagaagggatcttatttttaaaacgaagatcgataatatctactatgtactaaatgtcattctttaaaagttgttccctcataatttagtaaattacttccttttttaaaaaaaggaaagaaagagtgtttgtcttacaggctaacatcacaaacaataagtttcttctcatccatctccatttataaactagtgtgactgtcttctgagcacagtattaaacctggacagggagagggagggtgttagagaatgagaggaaaagagagagaatacctacatataaggtgaccctaaagaaaagcctttcacccttcggaagatcttttcattttcatttttctttttttcaaacaccaacttgtaccagagggaagatctttttttaaaagtgtttcactaaaatttgtaaggaaataatgagctagataaaatattacagtgtttatttaatgaatttactcatatttaaaataatatctaaaaagagtaatttaggaatattgaggcaatgagacttgaaggttataaatagtggcagtgagaaaaggaatattatagataagctgttgaaaagaaaagatgctaagttttctagtgcttccttctgtttccaagggattatagaaatcggagtttgtttgacctgtttcacaggcatctcctttgtggactcattgtgtctcttccttaggctaatagtcaccatttatcatggacggttgtcatgagtgttgaagcacacttaacctgcttcgtcagagggtacttggcatcaccggtgcacagctggtgtcctagcaggagactaactagctgacacaccgtgctttgttagcctaataatcttatttgttaaaacttgccatttgttggatttttctattttaccccattataaacttcttattgagatcagatgacttctgaatagcatttgctgtatttttccaaggtaaagaatatctttttcagatttttctttctttctttaatttcagaaatagaagaaatcttttctaccgaccttgtgccaggagatgtcatggtcattccattaaatgggacaataatgccttgtgatgctgtgcttattaatggtacctgcattgtaaacgaaagcatgttaacaggagaaagtgttccagtgacaaagactaatttgccaaatccttcagtggatgtgaaaggaataggagatgaattatataatccagaaacacataaacgacatactttgttttgtgggacaactgttattcagactcgtttctacactggagaactcgtcaaagccatagttgttagaacaggatttagtacttccaaaggacagcttgttcgttccatattgtatcccaaaccaactgattttaaactctacagagatgcctacttgtttctactatgtcttgtggcagttgctggcattgggtttatctacactattattaatagcattttaaatgaggtacaagttggggtcataattatcgagtctcttgatattatcacaattactgtgccccctgcacttcctgctgcaatgactgctggtattgtgtatgctcagagaagactgaaaaaaatcggtattttctgtatcagtcctcaaagaataaatatttgtggacagctcaatcttgtttgctttgacaagactggaactctaactgaagatggtttagatctttgggggattcaacgagtggaaaatgcacgatttctttcaccagaagaaaatgtgtgcaatgagatgttggtaaaatcccagtttgttgcttgtatggctacttgtcattcacttacaaaaattgaaggagtgctctctggtgatccacttgatctgaaaatgtttgaggctattggatggattctggaagaagcaactgaagaagaaacagcacttcataatcgaattatgcccacagtggttcgtcctcccaaacaactgcttcctgaatctacccctgcaggaaaccaagaaatggagctgtttgaacttccagctacttatgagataggaattgttcgccagttcccattttcttctgctttgcaacgtatgagtgtggttgccagggtgctgggggataggaaaatggacgcctacatgaaaggagcgcccgaggccattgccggtctctgtaaacctgaaacagttcctgtcgattttcaaaacgttttggaagacttcactaaacagggcttccgtgtgattgctcttgcacacagaaaattggagtcaaaactgacatggcataaagtacagaatattagcagagatgcaattgagaacaacatggattttatgggattaattataatgcagaacaaattaaagcaagaaacccctgcagtacttgaagatttgcataaagccaacattcgcaccgtcatggtcacaggtgacagtatgttgactgctgtctctgtggccagagattgtggaatgattctacctcaggataaagtgattattgctgaagcattacctccaaaggatgggaaagttgccaaaataaattggcattatgcagactccctcacgcagtgcagtcatccatcagcaattgacccagaggctattccggttaaattggtccatgatagcttagaggatcttcaaatgactcgttatcattttgcaatgaatggaaaatcattctcagtgatactggagcattttcaagaccttgttcctaagttgatgttgcatggcaccgtgtttgcccgtatggcacctgatcagaagacacagttgatagaagcattgcaaaatgttgattattttgttgggatgtgtggtgatggcgcaaatgattgtggtgctttgaagagggcacacggaggcatttccttatcggagctcgaagcttcagtggcatctccctttacctctaagactcctagtatttcctgtgtgccaaaccttatcagggaaggccgtgctgctttaataacttccttctctgtgaattagcactattttctatagttacttattctctggatcattttataatttccatattaatttcaaatatgctcgtgttattcttcagtgatttccacaattgtgcattttattctttggtttaagtactgaagcatataatgaaagtaattgctaagtagcagcttaaaaattcaattatccgattgtatttaacatctttaagagcatgatcataaagagctatttttgacaccccccccccacttttttaacatttagagttagtaagggttttatatctcttctgtccatattgttttcaaaggaatgaggtgtttaggtggctggaaaagcatttgtaggaagttagatttgaatatagacaaggtgggttattcacgttgagaatgttatttgaagaatgcctgtgaagccaggtgtgggttctactcagtgccatagatagactgagtcttctctcgtaggttaccattacatagtaattttgattctgaatttcacattaaattatttgagtttatacagacctaaattttaaaatctgtacatatattattttgatgtattaagatgaatattgctgatttaaattttatttatgcacatacttaaaggacagaaatgtctgggaaagtaattgttaaataatgatatgtaactttttaactttttaaataaataacaagatttttaatgtgtgtctccctcagggttgtttaaagttttttttctccctcaagtataaatagtggtaactatatgttttgtatcttctagcaccaactgctgtaaagcaatgctgcaaataatgcttgaatacaagtggctaagccaacaacagaataaatacttttatagtagttttataatcctgaaattcgaaagctttcccaattgcacttgcatctaaacaaaactgttgcagtttttactctatttattttgttccccatgtttatgaaagtcctgcacagtttcaaaggcatggtaaataatatatcaatgtttatgtagtctgttacagaaacagctatagataacattatccagtgaagagcaaaattcaagctttagaaaatattcatgcatgcaattttgacatatctaaaaataggtttttgtatatttatggtgggaggtggttgggaacttttaacaaaatggggtgttaatttttgtacagtctgtgggcatttacacatttttaatgtattaaaatttggtaattatgtgtacattaaattaataaaagttacttctagttatgatttgtgaattccctaagaccttggatttttttaagtaactttatatcagaaatgatactgcatctttatatttttaaaattgtattgctgctcaagaatggtaccctcttgtcaaaaaggcatacattcataattgtacattcagcattgtaaataatcttatgaaaccttttttgattgaagctattcaaaataaaaattttaatgaatgaaataac

SEQ ID NO: 3327 - protein, 637 aa, Homo sapiens
MVIPLNGTIMPCDAVLINGTCIVNESMLTGESVPVTKTNLPNPSVDVKGIGDELYNPETHKRHTLFCGTTVIQTRFYTGELVKAIVVRTGFSTSKGQLVRSILYPKPTDFKLYRDAYLFLLCLVAVAGIGFIYTIINSILNEVQVGVIIIESLDIITITVPPALPAAMTAGIVYAQRRLKKIGIFCISPQRINICGQLNLVCFDKTGTLTEDGLDLWGIQRVENARFLSPEENVCNEMLVKSQFVACMATCHSLTKIEGVLSGDPLDLKMFEAIGWIEATEEETALHNRIMPTVVRPPKQLLPESTPAGNQEMELFELPATYEIGIVRQFPFSSALQRMSVVARVLGDRKMDAYMKGAPEAIAGLCKPETVPVDFQNVLEDFTKQGFRVIAHRKLESKLTWHKVQNISRDAIENNMDFMGLIIMQNKLKQETPAVLEDLHKANIRTVMVTGDSMLTAVSVARDCGMILPQDKVIIAEALPPKDGKVAKINWHYADSLTQCSHPSAIDPEAIPVKLVHDSLEDLQMTRYHFAMNGKSFSVIHFQDLVPKLMLHGTVFARMAPDQKTQLIEALQNVDYFVGMCGDGANDCGALKRAHGGISLSELEASVDFTSKTPSISCVPNLIREGRAALITSFSVN

SEQ ID NO: 3328 - DNA, 6883 bp, Homo sapiens
caggagatttatggttacaatttgagtcgctggaagcttgccatagtttctttaggagtgatttgctctggtgggtttctcctcctcctcctctattggatgcctgagtggcgggtgaaagcgacctgtgtcagagctgcaattaaagactgtgaagtagtgctgctgaggactactgatgaattcaaaatgtggttttgtgcaaaaattcgcgttctttctttggaaacttacccagtttcaagtccaaaatctatgtctaataagctttcaaatggccatgcagtttgtttaattgagaatcccactgaagaaaataggcacaggatcagtaaatattcacagactgaatcacaacagattcgttatttcacccaccatagtgtaaaatatttctggaatgataccattcacaattttgatttcttaaagggactggatgaaggtgtttcttgtacgtcaatttatgaaaagcatagtgcaggactgacaaaggggatgcatgcctacagaaaactgctttatggagtaaatgaaattgctgtaaaagtgccttctgtttttaagcttctaattaaagaggttctcaacccattttacattttccagctgttcagtgttatactgtggagcactgatgaatactattactatgctctagctattgtggttatgtccatagtatcaatcgtaagctcactatattccattagaaagcaatatgttatgttgcatgacatggtggcaactcatagtaccgtaagagtttcagtttgtagagtaaatgaagaaatagaagaaatcttttctaccgaccttgtgccaggagatgtcatggtcattccattaaatgggacaataatgccttgtgatgctgtgcttattaatggtacctgcattgtaaacgaaagcatgttaacaggagaaagtgttccagtgacaaagactaatttgccaaatccttcagtggatgtgaaaggaataggagatgaattatataatccagaaacacataaacgacatactttgttttgtgggacaactgttattcagactcgtttctacactggagaactcgtcaaagccatagttgttagaacaggatttagtacttccaaaggacagcttgttcgttccatattgtatcccaaaccaactgattttaaactctacagagatgcctacttgtttctactatgtcttgtggcagttgctggcattgggtttatctacactattattaatagcattttaaatgaggtacaagttggggtcataattatcgagtctcttgatattatcacaattactgtgccccctgcacttcctgctgcaatgactgctggtattgtgtatgctcagagaagactgaaaaaaatcggtattttctgtatcagtcctcaaagaataaatatttgtggacagctcaatcttgtttgctttgacaagactggaactctaactgaagatggtttagatctttgggggattcaacgagtggaaaatgcacgatttctttcaccagaagaaaatgtgtgcaatgagatgttggtaaaatcccagtttgttgcttgtatggctacttgtcattcacttacaaaaattgaaggagtgctctctggtgatccacttgatctgaaaatgtttgaggctattggatggattctggaagaagcaactgaagaagaaacagcacttcataatcgaattatgcccacagtggttcgtcctcccaaacaactgcttcctgaatctacccctgcaggaaaccaagaaatggagctgtttgaacttccagctacttatgagataggaattgttcgccagttcccattttcttctgctttgcaacgtatgagtgtggttgccagggtgctgggggataggaaaatggacgcctacatgaaaggagcgcccgaggccattgccggtctctgtaaacctgaaacagttcctgtcgattttcaaaacgttttggaagacttcactaaacagggcttccgtgtgattgctcttgcacacagaaaattggagtcaaaactgacatggcataaagtacagaatattagcagagatgcaattgagaacaacatggattttatgggattaattataatgcagaacaaattaaagcaagaaacccctgcagtacttgaagatttgcataaagccaacattcgcaccgtcatggtcacaggtgacagtatgttgactgctgtctctgtggccagagattgtggaatgattctacctcaggataaagtgattattgctgaagcattacctccaaaggatgggaaagttgccaaaataaattggcattatgcagactccctcacgcagtgcagtcatccatcagcaattgacccagaggctattccggttaaattggtccatgatagcttagaggatcttcaaatgactcgttatcattttgcaatgaatggaaaatcattctcagtgatactggagcattttcaagaccttgttcctaagttgatgttgcatggcaccgtgtttgcccgtatggcacctgatcagaagacacagttgatagaagcattgcaaaatgttgattattttgttgggatgtgtggtgatggcgcaaatgattgtggtgctttgaagagggcacacggaggcatttccttatcggagctcgaagcttcagtggcatctccctttacctctaagactcctagtatttcctgtgtgccaaaccttatcagggaaggccgtgctgctttaataacttccttctgtgtgtttaaattcatggcattgtacagcattatccagtacttcagtgttactctgctgtattctatcttaagtaacctaggagacttccagtttctcttcattgatctggcaatcattttggtagtggtatttacaatgagtttaaatcctgcctggaaagaacttgtggcacaaagaccaccttcgggtcttatatctggggcccttctcttctccgttttgtctcagattatcatctgcattggatttcaatctttgggttttttttgggtcaaacagcaaccttggtatgaagtgtggcatccaaaatcagatgcttgtaatacaacaggaagcgggttttggaattcttcacacgtagacaatgaaaccgaacttgatgaacataatatacaaaattatgaaaataccacagtgttttttatttccagttttcagtacctcatagtggcaattgccttttcaaaaggaaaacccttcaggcaaccttgctacaaaaattatttttttgttttttctgtgatttttttatatatttttatattattcatcatgttgtatccagttgcctctgttgaccaggttcttcagatagtgtgtgtaccatatcagtggcgtgtaactatgctcatcattgttcttgtcaatgcctttgtgtctatcacagtggaggagtcagtggatcggtggggaaaatgctgcttaccctgggccctgggctgtagaaagaagacaccaaaggcaaagtacatgtatctggcgcaggagctcttggttgatccagaatggccaccaaaacctcagacaaccacagaagctaaagctttagttaaggagaatggatcatgtcaaatcatcaccataacatagcagtgaatcagtctcagtggtattgctgatagcagtattcaggaatatgtgattttaggagtttctgatcctgtgtgtcagaatggcactagttcagtttatgtcccttctgatatagtagcttatttgacagctttgctcttccttaaaataaaaacagaaaaatatatcgtcctaacagttaaattaacaatcaatccataaagtcctatatcttcattcagcaacccaaatattacatacatttccagaattttcttgattgttactttcagtgatattctttatattgggtacaggagaagtttggtgtttggtaggtttttcaacattagtttttgagactagtttacctcttcacatttatgctcacaaccctcttgttagaaaagtctgtgtttatatacaggctgtaagtttgtgattgataaaaagaagatgagtgttaattagcctccagtgaaaatatactgaaagcctgttttcatttgattccaatgtttcttccaaagaattctgtataaacatatgccaattccctatgatggtctagagttaggaatgagtgtttatggtgttgcttatagaacaactcaggtaatctccatttctggttttatattttctgtacaaactgcctgggttttatttttctaatcagcaaggtgcttcactgccttcttgagacgcctctcaaagctcttaaatggctcctgtgctatgtgtggtgttggcagtctaatttgcttctgttaaatgttgtagaacctttttcactaggaaataagattcatttctttcggcagtagatgtagattcatcttttaacgtttcttcaaatttgtttctgtcaggctttgtgttattttaaatggttttttaaaattttcttctatgttttcaattacctaaagacataggataatagttttttttaagttagaattttacctcataaaattttttgaggtttgatgtatgtctctgtcttatcaataatgaggcttaaaaaatactggatttgaatggctgccgttttttcaaagcaatatgaatttgatgagtttgttttatgccattaggtggcgccagaggtcagaacatgtctattttgaattggatcgttacaaatgagcatatttgatgcggaaatttctgggagaaaaaaaattgaggaaataaagttaaaaaattgacattcattgagccaaaagagatgtggagaaacatttttcacctttctgtttggcctgattaacatttaaattcttgccaaaattaaggtaacttttaaaaaacaccttttataggtggatccagcagtctggcaacgcccacagttaccacaacacagaaaactgatcgtgctataaaatggacgctaaactatgaaaacagtgtgacattgttctctgttcttccagagccagtaacatgcttgctcgtgctttctacttctagctgatcattcttttcccaacatatatttacaaatttaccaaattttacctagaattttaggaccaaatggttctcactctttatgctgcaaagacctggatgatgtttggtaactatagaaaaatagaaattacactcaggatcactgttactgctattgccactgatgattcctgcaaaaatataatcgaagttttccatcaaatgtataatatgctattaatacacattagatgataacagttgttccatgaatgattctatgaagctatgcatcttagacctcttgagctgtgaattagcactattttctatagttacttattctctggatcattttataatttccatattaatttcaaatatgctcgtgttattcttcagtgatttccacaattgtgcattttattctttggtttaagtactgaagcatataatgaaagtaattgctaagtagcagcttaaaaattcaattatccgattgtatttaacatctttaagagcatgatcataaagagctatttttgacaccccccccccacttttttaacatttagagttagtaagggttttatatctcttctgtccatattgttttcaaaggaatgaggtgtttaggtggctggaaaagcatttgtaggaagttagatttgaatatagacaaggtgggttattcacgttgagaatgttatttgaagaatgcctgtgaagccaggtgtgggttctactcagtgccatagatagactgagtcttctctcgtaggttaccattacatagtaattttgattctgaatttcacattaaattatttgagtttatacagacctaaattttaaaatctgtacatatattattttgatgtattaagatgaatattgctgatttaaattttatttatgcacatacttaaaggacagaaatgtctgggaaagtaattgttaaataatgatatgtaactttttaactttttaaataaataacaagatttttaatgtgtgtctccctcagggttgtttaaagttttttttctccctcaagtataaatagtggtaactatatgttttgtatcttctagcaccaactgctgtaaagcaatgctgcaaataatgcttgaatacaagtggctaagccaacaacagaataaatacttttatagtagttttataatcctgaaattcgaaagctttcccaattgcacttgcatctaaacaaaactgttgcagtttttactctatttattttgttccccatgtttatgaaagtcctgcacagtttcaaaggcatggtaaataatatatcaatgtttatgtagtctgttacagaaacagctatagataacattatccagtgaagagcaaaattcaagctttagaaaatattcatgcatgcaattttgacatatctaaaaataggtttttgtatatttatggtgggaggtggttgggaacttttaacaaaatggggtgttaatttttgtacagtctgtgggcatttacacatttttaatgtattaaaatttggtaattatgtgtacattaaattaataaaagttacttctagttatgatttgtgaattccctaagaccttggatttttttaagtaactttatatcagaaatgatactgcatctttatatttttaaaattgtattgctgctcaagaatggtaccctcttgtcaaaaaggcatacattcataattgtacattcagcattgtaaataatcttatgaaaccttttttgattgaagctattcaaaataaaaattttaatgaatgaaataacactt

SEQ ID NO: 3329 - protein, 1161 aa, Homo sapiens
MPEWRVKATCVRAAIKDCEVVLLRTTDEFKMWFCAKIRVLSLETYPVSSPKSMSNKLSNGHAVCLIENPTEENRHRISKYSQTESQQIRYFTHHSVKYFWNDTIHNFDFLKGLDEGVSCTSIYEKHSAGLTKGMHAYRKLLYGVNEIAVKVPSVFKLLIKEVLNPFYIFQLFSVILWSTDEYYYYAIVVMSIVSIVSSKIRKQYVMLHDMVATHSTVRVSVCRVNEEIEEIFSTDLVPGDVMVIPLNGTIMPCDAVLINGTCIVNESMLTGESVPVTKTNLPNPSVDVKGIGDELYNPETHKRHTLFCGTTVIQTRFYTGELVKAIVVRTGFSTSKGQLVRSILYPKPTDFKLYRDAYLFLLCLVAVAGIGFIYTIINSILNEVQVGVIIIESLDIITITVPPALPAAMTAGIVYAQRRLKKIGIFCISPQRINICGQLNLVCFDKTGTLTEDGLDLWGIQRVENARFLSPEENVCNEMLVKSQFVACMATCHSLTKIEGVLSGDPLDLKMFEAIGWIEATEEETALHNRIMPTVVRPPKQLLPESTPAGNQEMELFELPATYEIGIVRQFPFSSALQRMSVVARVLGDRKMDAYMKGAPEAIAGLCKPETVPVDFQNVLEDFTKQGFRVIAHRKLESKLTWHKVQNISRDAIENNMDFMGLIIMQNKLKQETPAVLEDLHKANIRTVMVTGDSMLTAVSVARDCGMILPQDKVIIAEALPPKDGKVAKINWHYADSLTQCSHPSAIDPEAIPVKLVHDSLEDLQMTRYHFAMNGKSFSVIHFQDLVPKLMLHGTVFARMAPDQKTQLIEALQNVDYFVGMCGDGANDCGALKRAHGGISLSELEASVDFTSKTPSISCVPNLIREGRAALITSFCVFKFMAKIIQYFSVTLKILSNLGDFQFLFIDLAIILVVVFTMSLNPAWKELVAQRPPSGLISGALLFSVLSQIIICIGFQSLGFFWVKQQPWYEVWHPKSDACNTTGSGFWNSSHVDNETELDEHNIQNYENTTVFFISSFQYLIVAIAFSKGKPFRQPCYKNYFFVFSVIFLYIFILFIMLYPVASVDQVLQIVCVPYQWRVTMLIIVLVNAFVSITVEESVDRWGKCCLPWALGCRKKTPKAKYMYLAQELLVDPEWPPKPQTTTEAKALVKENGSCQIITIT

SEQ ID NO: 3330 - DNA, 155347 bp, Mus musculus
  misc_feature (1)...(155347): n = A, C, G, or T/U
gtataaactgctctcaatacttagtcctcggcttccctggatctgcagtgtgatggagattagtggccttggaaccttgggttttcaatgggatcatgggaagttatgtggtttgttaataaacacacacacacacacacacacatggatatttgagtgtttgggaggaaataactgtctgtaattctgtctcaaaacatgtttttttcttttggttttccagaccaagtttctccgtgtagccctggctgtcatctatcttactctgtagaccagactggccttaattgcataaagatctgcttgtctctgcctcccaagtggtgggattaaaggcatacatcacaaccactctgctggtgtgtgtgtgtgtgtgtgtgtgtgtgtgtgtgtgtgtgtgtgtgtttaaatctatgggcagattggctctctctgtttttcccaaacagggtctagataaacttgcttagtaacctttcaaccccaaacaatggctctttttaaaatcccagcatggctgatatttgagcatgttgacaggctggcttcaggatttaaacaacattgattggcaggcccttcagccatatcctgcttctgttacctagaatagaccatttaatctgtccacatctcagttcctccccatgaaaatgaaaatgaggaacctctggggccaacctgtgggaagtgagacacctgctcgctggtgtatgctggttgacgggcccgtgtgatcatggcagtgggcactgtccacagactgaccccactgctgctggctcccgtcttcagcacccacttctagttttgctgcctgagggcctcagataaaatgagaaaagagaaagaagggtagagatttagaattcagtcaacaaggactgaatttcatagaaaatgagcctgcgttacacccagaagcttgactttagatatggcttccacagcttcacagttgccatcaacatggagtctcagctggccacagtataagccagctccgagcagcacatctttccttggcttttctcccctgttgtctctacttgcttacttctgtttccatggaacaacctgcagccaagtccttgtctcaattcctgtcagtgggccctacgtacgcctacataagaaagtgctcagcaagttctaggacagccagggctctgcagagaaactctgccctggaccataccccgcccccgaaaaagaaagaaagagtaagtgcttagtggatatttctaattattgttatttgcaggagaacttcttcactccatgtgtttgaaccaaaactcaacattttaaaatttgagtttaaagatacgtatgcagaaaaatgttgacttagacacttatcaaatccatctgatcagactgtccccagagtcagaaactcatgattcctatacatcccctctcatccatcccttcttacgccgtgcacgttagggcagacttgacctccattgcatttttagattgggaaagagcatgttctgggtgtgatgcatctcctacaccctgaatgtagatcaataataaatatatgaaggatggattgctaaaagaggcttattactaaagacttattacttattactaaaattcttctaccagagcacttagctgccacctctgtcttaactaggcttgtgcctgccggtcatatcactccactctgcataaatacaactaaatagtcgaggctggataactttataaggagtttattttgactcacttgtctggaggcacaatgctgaggctgtaggaggtgatggcttgcttagcagcagtctcagtgataagcgcttcaatggcagaaggcaggaaggatgtgtctccttgcttccccattctcttccgagaaagccaccacatccaaccccagagctctgctctgataagcctctctaactctaatcacaccccaaaggccctgtcttaaaatgccacatttaggagtgtggggagatagctaatcttataaaacacttcccacacaagcacaaggacccaagtgtgggtttccaaaatgtaagtaaaaaaatctagacgcagtggtgtttgtctggaagctcagggctggggaagcagagacaactggatccctggacctcagtggctaaccagcatagccaaattggtgaactctaggttcaggggagctgggggaggaccctgtctcataaaaaaaatggagagcaatgggaaaagcaaagcaaaacaaaacaacctgatgtcaacctctgcctccttatgtacttacacgtacacatacactactctcctgttaccacaagctcaaacctacaggaacacaaatatacacatataccacacatacgcacacacaccagataccacagccagatgaagtttctatgtgcctgatactcttggttcgggttaaactctggtaacaggaactttggaggggtaaattatatttaaaccatagcaccaatctataggttgagaagacactttgcatactgaaaaccacacgactcgtctactttgaatataacaagagcttgaagaactgaatgtgcacatgagatttgccgaaccattggcatcaactagttgggatgtagcccctgttgcatcaggcctctatttctgagtcagtactgattcatgaggtaatctggagcctaggaagcagccgggcagcagggtgtggtacggggagctcttgtggtctcagacctatttatcaggcggtcctgaaatgcttcatcctcttgtgagtgaactgttgcattggcctgccctctgtgaatctcagacatggttgctgtgattgacttggcgtccttcaaactcttccataactcccttttgccctcaaacaccggcagctgcagcaggattgagtgggactaagattctactcatcctgtgagcctggagctcttccccacagtcagagccaacggcgtagcccagcattggccttgactttgcctttgctggcgctaggctgtgagctctaagccaactggcctacacacatagcttctagcattaccactgcccgatctcttctaccttggaaattttcattgcaattactctggattttcacagcgatggcgctcatgtttatgtggctgtaactcgattgttgctgggtgggttggcacacctctccagatggactcgcacggggtaaatgtccaacttccaattccgttttacattccatcactctcctggcttggccatcaggccacacactttgccaaggtggttttatgatgtgtatcctggagtgtattcccttttgtgtatgtagctctgtttcctggaattattatttctggtggaacttgggctcatttttggctgcttattatttttccagctgtactgttttattcctttgacatttcatgaagctttatgaaagaaacccaaggtggactcctgagtttcacagacacatgccacaaaggcacgtgggaatggactaaacttggtcctaagggttttgtgaaagtcttctctgagaaccatggcagcgtgggagtcattaatgctagctctaattttggaggtgggtgttatggaacaagtggtgtgctaagcacctcatttccatctcatagccaagtctgtcttgcaggaggtctcagcctacatttttttgtgttttttcaagacagggtttctctgtgtagccctggctgtcctggaactcactttgtagacaaggctggcctcgaactcagaaatccacctgcctctgcctcctgagtgctggtattaaagacgtgcgccaccacacccggcagcctacattttataagtataagaaaaataggttcataaaggctagggctgtgaagatggatcagttcgaagaatgctcgctgcacagacatgaggaccaggatttggtagaaagatgtttgtggtggcccttgcctgtaatcctagctctgggaagatggagacaggagactccctggggcttgctggccagacagtggtcaaatcagggagctccagggtcaatgagaaactgtctcaaatacaaaggaggcaagtggttgaggaagacaatggctagtaacttttaccctccacataaaaatgcagatgtgtgcacacataagcatataacataaacacatgaacacatatacaaaatagaaagggggcagatatagagttagataggtgatatatagatagatagatagatagatagatagatagatagatagataggctaaggctaagtacccaaggacatacaatgaagtagtatagtcaggctttgtgagtgattccagatttcttgctttcaaacattatgtaaatctgctcctgtccctgtttgaacctgaccatctgtgactttccatcactggtagaatagaacctacaaccccctaacctggccaaatgttcctgccaaatactctgcgtttttttgtaaccttgatctcattcgtattcccataatccttagcctcagcagcagctcacgaggaacataccaagctaaattatctgaacttgtcctctgggcagtggggagccgtggaagtcttatgcagattcagtgggacagaagtccagatcagaggtgtttgaggcaacccaggcatagatgtgcaggggtctgaacttgggattgatagaggaaagaaggaaagaaggaaagaaggaaagaaggaaagaaggaaagaaagaaagaaagaaagaaagaaagaaagaaagaaagaaagaaagaagggagggagggagggaggnnnnnnnnnnnnnnnnnnnnnnnnnnnnnnnnnnnnnnnnnnnnnnnnnnnnnnnnnnnnnnnnnnnnnnnnnnnnnnnnnnnnnnnnnnnnnnnnnnnnnnnnnnnnnnnnnnnnnnnnnnnnnnnnnnnntgtgtgtgtgtgtgtgtgtgtgtgtattttgtgatgtgtgtgtgtatgtatgtgcatgcatgtgaaggccagagcagatgtcagtgtctgcttccatctgtgctctttactttactgccatgtgacaaaacctttcctgggaagacacaacatctctttaccccagacagagagccctcaactgaccaaagcacaaatatgactgaagtcctacttagtgaaaggtttattatgctcatttacaggaatgtgggtgaggggttacttactggggcagaaatgactcaaatacaggtaggcacattgccaaagtccacctcagaatgggtgacagatccccaaactgggaacctggagctcactgtacagccagctggcagctcaacaggttgaagaatgtctttcccaggtgcctttgttgccagcttctaaaccccttctgggctgctgggcaggtttctgcttctcccaggcaactcttctggtctgtgagtcttctttgcgcccagctttcttgtgtctgaggggtattctcagccattaatactattcttacagggtagagcctagtgaatctagtcagtttcagggacttcctgaagctattttgagttctttaccttcctgtgtaaagagcttccccataggatggaatctctgaaaaaacagttttcatcagtctcttttggccagtgagttctggagatccacctgccttgactcctttatgtatttcagacttgcatgactaactaagttcaagcactcttacgcactgagctatctccttggcaccatttctagctacttttaaggagtctttgtgaaggtctaacagaagcaaatgatgttatttagttctactgtgtttttaccctatagctttgaagaaccctgaacattgtaaaataatttcccttccttgtcctctttgaacattttcttccacactgggcatggcaatttgccaaaagcttggcaagcaacaacaacaacaaaaacaacaaacaaccctcccaaaaaacccaccaccaacgaaagtctccttcctcctccacaattgaactaccagccacgcagcatcaatcctagattaagcgatcaaacagcacctgaaattaagcttttaaacgcaaaaatcaatcaagcccaaagaatttagctcaaaatgaagaggtgtttaaaagaagtagactgaacaatactgagaaaaacaatttaaattattaaagtggggttttcatagttctggagaaatgctccaataatgtcagattaaaaatataaatctactctccttccacagtgttttcaggaggcttctctttaaggctgactgtacgtgtttgcttatgaatgagtttgttacctgcagaagagaaacagcactgggcatgcagaatgcgttccctgccatttgtcactaactggggctctcatgtgacttctggtttgttagctaattacttcataaacatccccactgaaaaggagagggcattcaattttgtggttttttttttttttttttgaattcaagtgcaaaatgttcttgtggttgaaaaagatggttcctttcttctcaattcattttatccttcctctgcttcctgaccctgtgggggtgtttgtaatacagaaattatgacattaaaatcactttcatgttagtggactttgatgtctgtaatagtaggtcaagaggtcttggaggcagaattagtgagatggagaaaccgggcgggggcaagttctttaattcagtgaccttcaagaggacccattcggctacaaaacaaggaacccaaaggggtcatgtgctgacatgggaaataaaagcattacatcagccctgttccagagaaatgcattgtgaggcctgcacataagccacagagtgagatttaaagttttctagtagttacacttttaaaacattatgtatgtacacacacagcacacatacatgcatatgcacacaaacacacacacacacacatgcacacacacatgcatatgcacacaaacacacacgcacacacacgcacgcacgcacacacacacgcaagcacacgcacaccacattccacacgtgagatcagggaacaacccacagagctagttctctccttttaccaggaggggcttggggactgaagttaggtcatgatgcttggcagccagtgcctttatcagctgagccgtcttgtcaacttagctgcatttaaataaagtgatgaaaggcctatatgttttaatattaaattttaccatgtgatcaaagtaaaattattgccttttcctgttctttttggtactcagtctttaaaatctactttgcatattatgtttaaagcgccagccattcagagtaaccacaatacaagtgcttattgcaatcaaatgaagcttagcttaagggtaccatattctacactggaggtctgtaaagttcaaagacaatgctctcttgtccattgctgatgggtgggatatacactattggttagttttatgtcaactagacacaagcaagagtcatttggaagagggactctctgttgagagaatgcctccttcagattgctgtaggcaagtctgtagtgccattttgcttttgattacttgatgtgggtagtcgatgctgtgaggtgtgggtgtgtggcatgccacttccaggcaagtggtcctgagctgtaaagaagctctgagcaagccacgaggaggaggcaagcacgagcagagatccaccaaggcctctgcttcagctcctgccccttcatgatgggctgtgatcaagatgaccaaacggaagtaaatctttccctccctaagctgcttttcgtcatgagatttaacccagcaatagaaacctttactataccctgcactcataatgaatccctaaactcctaaggaaagaaaaagtagaaatatatctatgacaaaactgtgcaaggggttattctcttgataaactgcaggttactgcccctactcctgtacttgttctttggtttcaggactggccacaggtgtgagaaattacattgttaaggggacatacaacttcattcaaggagcaatataaaataaataacaaatttcgagtcatacaaagggaagggtaaggggctggggtggagagatggctcatcagataagagcactgactgctctttcagaggtcctgagatcagttcccagcaaccacatgtggctccctatcatctgtaatgggatctgatgccctcttctggtgtgtctgaagatatatatatacatatatacatatatatacatacacgcacatatatagatataatacaatatatatacacatgtatgtatgtatatatatatataaatatataattttttaaaaagtggaaggtaaaatttctatcattttggatagtgcaaaatatttgttaacagacataagacaatttctctcctgaaatcctatgactacattaaatgtgaattacaagaagtcatttcccagcagtgttagcttgacaatttaaacacatgtgttttctcactctctctccacacacacatgcacacacactctctctctctctcacaatacacacatgcttacacacattctctcacacacacatacttacacacacactcacacacatacactcgcacaccacactacgctcacatacccacatgcatgcaccacacacacacacacacacacacacacactcagcaacagctaaagaatgactttaatttccagcagggaaaactctcaggctcagtggctttggggagtgggagctgcaacccagaaatcttttcctgggagtagaattgtattaaacgctgaaattaacttttgtttattgagcatttccatgatcatagctcagatccagtggccacatcatctttgaagctgcagataagttctgtgtcttatggtcttctgaactgggcttgttcacggtggtaagtaacgatgtgtggctgttgagaatgttttcccttccttccttccttttcttttctttttttttttttcttttttttgagcctcagagacttcatttgtgtcacagaaacattactgtctgtcttcagaggttgttgtaaaggtaaagtgtgaccatgagagtgccatgcctgaagcagactagtgccatcctcctgcagctttctggaggatgctaagtgagattcagctgttctggtcagtgtttgctgtaatgccatgaatagtaatgttatcgccttgtaacaaaagactttttggtgaaagcaataacccagtgaatgcactcagtcttttggttagtaacctagatgcagcttagaggagcacatggacttaaggcaatcatggcttcctctggggctgggggctcatttgaaggtctaaccagagaaggtcaattgctctcaactgctaagtcatttcctcagctccatgataataggctttccttaaaaaacagtgtataatgcccaaacaatggaaaatgcataaagttttggggatttaaaactctcctcagtgttcttagatctcaggatgaaatgtcttctctgctcctccagtggctccaggaactaccatcctgagaatcaccccccccccagtttattagaaatgcagacctgttgagtggaagtgagctttataacggggtcgccaagcctgcctgatacattttggagtttgagaagcaacggtcgtatttcactgtcaacaatgaaaaaaagttttctcctaagaaccggttcttcaaacttttttcttccatctaggctctggggagatggtgactctctcatccccgcaggatgcaggaagaaagggaaaccggccgagagaagagccggggcagttaagaattcctcgcaatttgacccctgaggcagcaaaaactggatccgccggacctttgtaacctggaccgtggaggagagctcaggcggccacattcaactgtgagcgtgcagaacttggctgagctctctggcctgggagggcgggggcgtggctgggccggcgagagggcgtggccggcgccgagaggcggggtctgaccgaggccgcggggcagcaacgtcgctgggcagcggagcggcggccgcgccatgtggctgctggggccgctgtgcctgctgctgagcagcactgcgggtgagtggggggcgcgtgacgcgcttcaccgagcgccgggcgcgggggctgcctcgatcgtccctgctccgcgcgcgggcctgggctgcgggcgtgggtgtgcgcgaagggcggacctcggcgccgggctggccgggaccccgcgaggggccgcggcggggcgcgcgccgcgctattgtgtgggccggcgcaccgggtgctgttgtcgtgtgtgtgcgcgggcggagctttgtgcggcgccggctccctagagccgggcggccgcccggattgggcgtagttcgagtgtggctctgtgtgctgggaaccgaggagggaaaggagaggactccactcttgatttcgggtcttcccggattccctcagcctttaacatacacttttctgcctcagtttcccatctacgctctccccgcatctgcatcccagcttcctttctcttcttccctggaccgtgtctggtttgggaatagcgagatgcagtagggaatggacatggaaatcattcgttcatcctgggagcagatcttttacttctgtcgtctgtcgaagatgccttaaccttcagggagcagggaaggaaaagaggaccggggcttcctctaacggccgttggtccctgcatctcagagcgcgtgcatcctgagacccgcagggtccctcccagacagagtgctgttcccaggaacttttctgctgatgtgggcacgctccgaattccagcttggagcccttcccctctgcctctgcccgctggccacagctgtcagcagcccctccacagctctgcccgcccttggcccctgatgcttatttctgggcagctgatgctcacagaactttctttactgaagatttcatgctctgtggccgtatcattcacacgtctaatttatgtcggatttttccaaatacttccagaaaacttggctgctgcgttgtgtttgttgtgagggaagtcaaaacctttctgagctaccccttgcagatgtccagcaaccctcccttcctagaagttgcaagtcctgtgcatcctctcaaatgactggccagcgggacctccccctcccccatcatccccactcctctgagactccatttaaatgtcttgtgggcttgctcagtttccagtgaggggttaggctcctgtggctgctgtaggttttttttaaaaccaagactgagggtttgtgttctgtttgtctggagttatggggattggggggagggggttgtggagaaggaggggagggcaaagtgaattaggcagctataagcaggtgcaagttatttggaggttgttagagcaggctcagttccagggcatctcagacatgaagatctgcccggattcacacatttaattcacatagcaatggcatgtcccttggtaacaccccagctggctcctctgtgtgttctctgcttaggaccagtggacactaattatcacatcttcttgttgtactgggtcgcatgagttgagttcacaaaaaattatatgtttctctctttcagcaatggttatttaatatgcctgtggacgtataccatagagcaaggaagtgcagtagtcaccgtgagccatagttggggtaggggagggaccgccagtgttccttggctgaagttagctgtggctttggattactgaacttgctttaggacctttaggtggcttgaagcctttccctgttacactaaggatcatcttttaagtgtgaactatgtcttgaaccaagtgttgtaggaaacaagggttggttgttgagccaacatctcccttcctagtcctcaatccttccctgagaagttgctaataccagagaggttgtagagcccaggactttggaaggtttcctgtagaggaaacctgggctctgagttgagtattaagtccaagacttgggcctttaagattgtggctgttactattttctcatgtatcctgtctggcagcgcagatcacttcagagttacatcacgttgtctgatgccccattttctggcacctggatgctgcacgtggtgggcttaagtgtgtgagtctttagataattctaaagcgggtgtgaaaatgagtggttggttgctgcatcctctccttctctggctagcttttggtaagacccctgaacatctcagggaagaggcttggtttcccttcctcctactagaagcagtgtgcctattaacctttcttcttgaagaatctgcttctcggcctgagctgtgggtgggttttgtttatttttttttaactagttgagtagttgcaagtagtctagcctagcctagcctagcctagccccacccaacggggtagatgagactgctcagaagtacaaataaacacaccttgttccttttcatcttcaaaggattgtctttggggctccctcctggggtgtgaggtggcttttgttttggtttttggttttcctgatagcccactagatcgagcatttaatttctgtggaggaggaagcagatggagatttgaatggtagatggcaagttggttaattcctggtcttaaaccctaccctatgcagggttaagttagtagtgggcttgtgtgttgccaccgctgtttggctgttgctgtttctgttttggtttattgatgaagagtttctgtaacccaggctggcctctaactattatccttgagctagatatgtagttgaggctatcttcctgaaacttgctcaagtactgagattacaggacccacccaccctattcctgtgatgttgggaataaaggagggcttcactctagctagggaagtgcccgtggctaagtggggcattcttaagtccaacagttctgaaacagttgagaattttggatcaggaaattatgcgatttgatgatactgtataaaaaagccttgtccttttgcatagggaggttaggggactccaggatgtgtgacccaagtcactacttgagatgtccatcttgccactgaaaacagctgaccttctccactttttccagagctcaggtagcaaggagcaggcagcatgtcattccgtggttcccaagagactgatggctctccagggcaccgtggtgtcaatggaacctagattctaacccaggcttttctcagaaccctttcctggcttctcttgctaataccggcttgatggaaattgctaccgggtctgttctgccagagacttttgtgattttaaaacaaccaccgcagagtttgcccatggccgccgtttacttcttcaaatctgttcattttatggataacacccagaactcagtggtccctgaagagctcacaagtgttcatggagaatagttccaataaatctcagtctttatgtggagatgtagggtagtctcagtaacctcacctctcccatgcatgaaggtgagaatcttgacaagaagacactctaggccagacactactgctgatctcagtagtaccaaccttagggtgcttactggtcgggctttatatttgtgtttctaacttttcttatatgtttatcattttgtataaatgtaaatgagaagatgtgctatgtacacatcttagagggttggagttgtattaattatgggatactttcagggacaaatatgcttatggctgttgagttccctccctccctccctccctttcctccttccttccttccttccttccatctttcctctctttctttgagatgtcttctacccagtgaccaacaaagtgttttaaaggctgcacctttcttgcattggaatgactgtgaataatctactctcttggctgctaaggagagaattctctattctttttgctgggagggtggcccatgtactttgaaattgcaacatttgctggtcatatcatttgctaggtgtttaatattgctcaccagaatgagaagactctagagttgctgtaactgctcattgaagaaaattaggactgtgagggttcccattgctgcttccaggagtgaggttagtctagtctagggtttcttggcctttagagccactgacattttagagtgaattagtcatttgttgtatagactgccccatgtatggtaataatcggtcatctctctggttcctaccaacttgaaacgctcccgtgtagttagctgggtgccagccttccagctcttcctgttgagcattgttcctgcccaccctaaagatctttgctggattacattctacttcatcctacttgcctctaggcatctgaatccacccaagttcaaagatgtaaaaatacacccttaactaacacgtccttggtgcggacctcttccctctcactttcccctcatgctgtaggaaaaacacttggaacttttgattgcagcttcagctccccgggagagacatctgccagtaaagctggtcacagagaggcggtagttgacaccaaaagctacctggctccatgagtgttaagcttgggctgttcctgtgctcagagcctgcaggctgaaggagagcgtcttgcctggtttttttgtcttgagaaatgttgaaatcttaaactgaaagtcccctccctccactccatagagctgtggttctcagcttccttccctctccatgagtccttctccagtatcaaaagcctgtacaacttgggacagttctgcatattgttgggaaattatctatgctcatggctaggtggtttcttgaagtttttgctgtatactctgaagtccctttaaagttccattctgtgtggctttatacactgaagttcctttaagactcttcccccacagccgtccttttctttggtctccagacttccttgaggtcttttccttcctcttctcctcagatgagccatataaccggtgaactcctgcctcctttgatgcttgaatctgcaggatgaagaaagtaggttcccaaaagggaattcggggcttccgtccaggcacatttgtcttatcctcttctgtccggcacatttgttccatgtcctctttgaaagccttctctactgaggagctctggtttctcaagcatgcagctacccatttccttcttgtcttttgagtaatgagaaaattattcttaagccacattcatgtgtccagtagtgtggtctcagagcctgcacacaccattactgtgttgtgcttaggagtacgaaactaggcacaacttgccatttgccaatggagaacaaaaggatctatgagcgaatctgagtttgctgatctttctatgatctggggcatgacagcagccctttctgccattggtgcctcagagacatttcttagtgtcaatgatattggagtctggacatcagtcatgatgctggggcaagcatggattcaggacagctggacagcacacatcctagctcatccctttagctttgtaggtaatatatgtgttggtgttttaagacttcttaagcctcagctttgtgggatttgagtaatttctgtgattgttgaacactagtgtttggttaaaagtatgtgtgtgtgtgtgtgtgtgtgtgtgtgtgttgcttgacatccttgtggactggttccagaaccccacttagacaccatggatacacacgtcctttctataaaatgacataaaatgtatttgtatataacttaatgcatttcctgtgtactttaattaacctctacattacttagaattctgactacagagtaaacactgtatgagtaatggttatactaaattttctagggaataatgacaggaagtctgtatatatttatatatccacaagagatgcatttttcctacagtgtgtatggtgtgttgtgcccatgtgtgatgtgatgcatgcaactgtgtgcatgtgggtgctcatacctgtgaatgtgcatgggacggccagagaaggctgttgtatgttcctctatcactctctgtcttactaccttgagacagggtctcttctgaactaaatgatgcctgttttagcccagatggctggccagtgaactcaggacatcctcctttagcgatcccaattagggttatagacaagtgcagccatacctgcttgtccagtgggtgcttaatatgtaatctcacctcctcatgctttcagggaaggagtcttactcacagagccatcaccccagcccatttccacacactttgatgtgggtggacaccgaaggcacacggtatatacctttctttcatatttcctgagctgacgaaccactaatcctactatgttgtaaattgctcaaggcctgggactctgtgtcatgtttcttgcttcttctgtgatgctgaggagactaggaaaagcctccctcactgaaggtccactctgtcaggcaggatgccaggcattgcatattttaccgttatgtccaattaaaacatcaccagaatacctgtgctcagaattcagacactatagaagtatgacaatgagatgttaaatcttcccttcacctttctctccctacccctgagtaactgctgtggaccatctgaagattcctggattcattgataaatgcacatgtacgcatgggcaggattcagtgagtgtgtgcctgtctggggttgtagcttacctcttcttgctttcttatattgctatcagttttactttgagtcacttgggcaggtcacttgcttccattgggcacatcttcggtactcaggaggggttcagtagtttctgtcagccatgctgtgtttcgtggctcatccttctgccctgtcttctaagcccagggtgatatgtctgcagccatctgggagcatctttttctatcaagtttctaaacgcttggcttttacctactaagaaaaagggctttgcccgcattctttttcagtgcactattacccatttgcctcatccctgtctctttgtgttcatatttttaaaaaatgatttatttttattttatgtgcaattgtgttttgccggcatgcatgtatatgtgcaggtgtcaggtctcctggaactggagttacagacagttgtgagctgccatgtgggtgctgggaattgaacccgggatctctggaagagcagccagtgatcttaactgttgagccatctctctagcccccatgttcacatttttttattccaataccatattctagtgacctcttttgagagatatcttaaacaataggcatcctcaacccaggtagttcagaacttgatgaaaatgataacatacagatgaccatagctaagttcacccagccaggtcagtgatcagtaaatcacagccatgtctgccatgctgttggcccttgcactcatcctgtcttagctgttacaaagtcaaagatgttcttagctgcctttattctagttcttatctacctactcatccttttcaatacagctttaccaacatcttccttatatatgacatttagatcgacagtgtgctctgccatcttgtagacgagcaaaataaaaataaggtcaattgaaagcccttccctgacgaacaactgtcatgataccagaaggttttgtgcaaacttccaaaggaggggagcaaccaacagttctaccaactctgatgcttgtgagccacaacaatgcatgataaccccaagggaatagtaacggtacacatacctcggcagtaaccaacagctttctgatttaagacccactcatcaaaagggaacttttgcgtggtattggaaacctagttaattgctcaggactagtgaagtcatgcatcttggagaagaccctacaaccactattgtgctagagttacccacagataaatgtaggtgtcaccgtcattgagagaacttctctctgaaacagaaagagactggatacctctacaaaacaactcctgctcttaagtctcagggaacattgctagtgaggtggcagaaagattctaagagctagaggatggggagtttgctgtgagactgtgtctcctaggaatgtcaggaactacacccatacaatctcactaatatgactgcccgaacttgagctgaacaggggcaacagcagtacacctgctaaagtggagggcggtgaggcctcaaccctacacaaagagctacaagcaagtggtgctcgcagcagagtaggagaactagacttccctggagaagagacaccaactggtttttattccgtaccaaatagtcagccttgaaaacatctatacacaaagcattttacagaccaatcaagttgtatttatgtatttaggaatacctatgtatagacatatatgtttataacagtaattaatcaaaaagccatgaatttgaaagtggggtgtatggaaggatttggagggaggaaagggaggggaaaatgatgtaattttaatctcaaaaaagtagagaatttttttaaaaaggtggggtcactgccgtaagagtttgaccagggaaagtggtttcaggattggcatgtaggtctgtgagcgtcacagccttaacctgtgctcaggcctaacctcgggccgtggtgttttctcatcccatggttgctggaagatggaagtgcagggtctcacctctgctggggactctgtgagaggacagtgttgtcagctctcacctcttagtgcagggtctcacttctgctggggactccgttgtcagctcacacctctcttgttggagaggaagccccagctgattctgttccagaccacgttcttgtgttttggaagatggaagtggatgggtggcctttctcctgggtggggatgttatctttgggggcttttgagtcatcctttgcagacgtgtggcttatcaagagcaacaacaagttgttatggtgttagatatgcaagtgatattttgttggaatactaaccaaaaggcattaagaattttttttagcactctctctgtctgtctgtctctgtctccgcccgcccccccctccgtgtgtgtgtgtgtgtgtgtgtgtgtgtgtgtgtgtgtgtgtgtgtgtgtaggtcagaggacagcttggtaagaattggttctgtccttctaccctctggctgtctggaatcagcaaggttatcagtcttgctgtcaaatttctttccacaccgaacgatctcaccagccccatgaagttttcttctctcaatacaccttataaacagtgttagtgccacagataaatgaccattgcataaaacacctaaaaccagattttctagacaaaagcagagccccgatgataatgatataaaaagcaagagaagcttcaagtttccagaagagccactttcctactctgagcatccatgtgtacgcttcccctacaggagaaggctttgcttgtgaactgatggttgttgatattatttacagtaccaggtaacattttaatgtagtacttcagaaggatgctaataactctgtcccctgtcctcatcacccaaactgaggaggacatgtgggcagtggtacttgtaagttatgattgcttctagtttataaagatcgttatgggcagatgagactggacctaaactctcattcctaaggtctctctagagaactgaaaactggaatcagactctaattttagtgaagtcctcgtgacatcaagctacggtgataaattgggtgaattctcttgtgccttagtccgactgtgatttctgacaagtagcaaactgtgcagatgaggctgtctctgtcctggagagtggccacaaagagggagggcagccatggagcttattctggagctggagggaagtagaatttatgaatagcttgatttagaagactcgtaaacccaaggtgccagtttccaggtggcaacggagtacttgtgtgtgtgttggcaggaagaaatgcaagtataaagggtgtttaactttacaacatcaaaactccctccctgctcattatttcgaggtccagcgaggttagctgggcatgtcggctgcgtgtgtctctgatggggcctctggagcagtttccatcaggcttcgccttgaatcagagcagtgttctctgtaactcactggagatggctgaagagtggaccccagtcacacttgtgagttccaggcttggctgaagcctcgcctttggtttggaaagttctaaatttaacttgtttttttcattataaaaataaaatgaaagagttagcagggaaatggaagaacggttaacaatgcagagtattcatttcattagcgccaaagctataagaagtggtcgatgctaaggagaagcagaacagagatgaatacagtgtttcaaaagcagatttataaaaacatcccttgtaagcttgattaaaaaacatgatactggccagtgagccctgctggcaggagcccagagaaggaaagctagaaaagttagtaatcaccatggaagagataaaattggaaagcgtgacgtgtgccttggaaatgggctttatcgatgaacgcgaacggatctggtaagtgttaaaggggaacagtaaatatggagggaacctgggcaaggcagcaatgacagaacccaaaggatttagctttcctaaaattcaggtgttacccaaatcaatgatcaagatcctgcaagaaaaaaaaatctaatggatgttgaaaacataaggaagttgttcatttaaaaaaaaaatcagatcagagcaatcaaagagattatagaaagtagagagatggctcagtggtcagagtgcttgctctcaggaagacccaagtcttctagacatctataggaagatcaagatatggctgagcctgtcggtggtggcgcacacctttaatcccagcacttgggaggcagaggcaggtggatttctgagttcgagggcagcctggtctacaaagtgagttccacgacagccaggactatacagagaaaccctgtctcgaaaacaaaaacaaaaacaaacaaacaaaaagatataaaaagacatggctgcatgtgctcctaactccagccttctgtgtttgtgtacgcggggagaaggggtgggggaagggagcagaaacagaaagagatgccaagcaagggcttgcgggctgtccagcctgtctaaaatgctgagctctggttcaggggaagattggctcaagacaataagcaaatggtaaagacatctgacatcttgttttggcctctgtgtgtgcacacacgggtttagcagcacactgaggtatgtgtgcgcgtgcatacatgcacactcacacacaaacacacacacaccatctccctcactccatcttctcctcccccaaattggaaacagtattagatggtatatatcagcatcccttgaaaacacccataaatcatgactcagcaacaaatcctgaacagaggtgggttccatggggcaggtggggtcccttgtattttctgatgtcttttactggtacttttttttttttttaacagatcttgcctgagtttatttgtaagaacagcataggacactggtcatctgcaaatagtgtgtggggaggtgtgtcacagcagtctgtcttcacactggcaggagccttttctatgaggccttcacaggggcttgggcacctttggggccctgagcacctttgggagcctgggctggagctgaagcctgggccttagctggagctttggcccctgccttggttcggaccttaggcttcggttggcagagcctctgacccttggccatgtagctttgaatccgcttcccaagcttagggtgagtgatgaaagcagccgcttgagtttggggccctttggcatcttgggcttgatggcctctgcgcgcgcactcactgcctttgcgttgttggcctgcatcttcttcaggcctttcttgttgtgcttcttggcaaggcgcatgttcctcaggaacttggggtcaacccccttaagagaccggggtttcttgatgccatttctgtgccgtttgcgggactggttgtgtgtggtgtggttcttggacttgttcatgtctgcacggtaacccacggctcccacagcgaatgggaccggaagagaaagagcttactggtacttcccaatacctggttcagtgcttggcatcatgtcagccaggcaacagggtttccagtaagtcatctagaggaagcaatggagggggcagtgtggagaggtgactgtaactctgaagataatgaatcagggagagagccagatgaagccacggggaatgaaatttacctgcccaagccaactgtgccctttggtgacaaattatttctcctcttggttttggaacagtctcattgatctttaaagagttgtaaggatcgttacaagagatatccttggcttaaatagacaaagaaaaggtggccgctgtgaaggaaatagattagagcaatttcagatcaggctataaattaaatacctgcattacaggactagcatgccccacgtggaaaaggtttatataggtaatgaaaactgccgtgggtcttaattccactgggaagagattcacatggttttctgactaaatgggagacacttacaaaagtgccaaacagttttatttaaatatcattagtttaaaaaatgttaaacaagctgatctaatttaaagggaaaaatatttactggtgaaactacacaaatgactccagcaataaatacaatgttgggtggaaggaaagggtgatatctgcacctatacatatgtattcgagatacacacacacacatacatcagctataaaactaaatgtcaaacaaaatgttgctaacacttaatatagaaaaaagtatcacccatatgtcctgagaggagattaaaaagcaagagggagaaatagaattcaaagttagggagataaaatccgttctacaaggggacttgatggtatcagttcagaatttacatgacagtgaacactaaggtagagcaaacagggccactgcgagtggcaacaggttcattaaacaacaagagtctcatcgtctcacggcccccagtggaggagctagagaaattacccaaggagctaaagggaactgcagccctataggtggaacaacaatatgaactaaccagtaccccggagcacgactctattgactttttattattgtcttgaattctctcttacatgcatttactcagactccactgttaactgcacagagctgccgtggcccctgcatcctgagtgtgtccctcactggattactgaggaagtgtcacctaggcataaggtggagatacactcactcctccaggaagcagcggcagtaagcttgcctcctctccatccatctgcagctaggtctcaagcacctggacttgctgatgcgtgggcgcgtgggcgcgtgggcgcaaacctgtgtaaaatgaaggtggagttctgcctagggcgtctcttgtttcttcctgggttgtcgaaagtgattcgggttgctgggctggcaagaggtgctgcctcccagacctatgcaccgctagatgcagccctagggagagtgcttgctctgtctctgtaattcaggcggtggctgttggcaatctctcggaaaaacttcctgatcatcctccaagccatggccggtgagtcttcttttctagaagccgtaattctgtgtttagctcccaacctagaattgatcactggctgctgctgctgctgcttctcttttttcagacagagtttcctctgtgtagcctcatggggagnnnnnnnnnnnnnnnnnnnncacacttggcactgctaaacgtatcatactgtattacagtttatttttgctttttttcaagacataaatggtttttaaatcaatatggaattgtaaaagtaatgtaagttctttaaacatgtattctcaatttactttaaattctgatatataatatagttaatatataatatacaacactatatagtaaagtatatagacactacatgtagtatataatgatatacactataatatatgattaataataccatatagtctgtcacgcagatttatcaagtgttaacatcttccaattaaatttatattttcttttaaaaacctgtcttgctggtgttatacccagtccctcgtgctagagatggggtattgctaacagtcctggctgtcttgaactcattcctcctgcatcagcctccaaagtgcagggactataggcatgccaccatgcctggccgttaatgaactttgaaagatatatttgacagccaaacatggtggcgtatgcctttaatcttagcactcttgaggcagaggcctggggaatcactgtgagtttcaaactggtctacagagtgagctcccagtcaggcagggctacatagtgaaacatagcgttctctctttagatagaaaattctctcttcctgagttttggagcacaggattgtgtttcttgaggagccctggacaatgttctgtctcacaactggactaattcctgggggccaggtttatagtttggggtgggtcctgagacatcagtatggagtgagtgttacagctctgttacagctcagctcaggatgctctccttactgaaggcccttccatcccgcagtctggtccttccatccctgtgaggccatgctaaggaggcattagctagtgaccgtttctcccatgttggtttgtgctggcttttagaggcacaacagctgcttctgaaaacctcctgagttccgggggccctttgcgccccatacatgaacgcgtccttgcaatcgaccagagacaatcagagtgttgacttggagataaacatacgttaaaggagtcatgcagactgtgtgacttttctgttttaatttcaggtgagggctgaggacggagtgggatggaaagggatgaaaatctctttagacttgagctgtttgtgtgcacaggatgcatccgctattgaaaggacgtttatatgtgtatatgaggaaataaaactgtaaaagattggctttgcaaaataaatatccacatcactggaagtgctactggaaagatagagaaaacatggtagagattcaactaaaactagatgtgatcaaatcactaataagatggagatggagcaaaggggaaactaaagcgactgggtgagaactctgtgtgtgtgtgtgtgtgtgtgtgtgtgtgtgtgtgtgtgtgtgtgtgtgtgttgtttaagcccagactttaaggggagtagtttaaatcctatgggatttgatttctaattatgctctaccttacagcctgagattttaggctgcatatatatttgtgtgctgtgtgtgtatggtatgtgtgtgcacacgaacataaatataaatattattacctgttgtccctgggagaatctagcattggataaagttgttcattccccgtctgctaactttaaagttgcctgtttggaacagcactggtgttttacaatgtcttattattccccgacttgtaaggcaacacagtgggtgtggttggaatccagcttccccctgcctaagtaactgagcgtttgttgagagaaactgcacacagatttcaggtactgtacagttgtgctaagatggaatcccaggctggcctgggctgagtgccaggtgtgggactgagtgtacgcactgcatctaggatgttgtatgctatgcattttgctggaaggagacagggcaaccgaggctagactggaggaggacatgccctcctgtgaatacctccttattcacggttccctactgtgacccatgtcacaggactgtggaagtgctttgttgacttgattttcttgcatgttcttaaggtttctagaaggaaaggaccatgctgagtgcagccaggcctcatgggaggccagaactcagaagctcagcaatttgcctagacttggacaaggcttggctttctcatctctcaaccctgcgctgtggttggtgatggacaccacagaggcgaaccgagtctactcaacaaagtctctactttggtggatgctctgttcagggcaatgcgttggccttctcttggctnnnnnnnnnnnnnnnnnnnnnnnnnnnnnnnnnnnnnnnnnnnnnnnnnnnnnnnnnnnnnnnnnnnnnnnnnnnnnnnnnnnnnnnnnnnnnnnnnnnnnnnnnnnnnnnnnnnnnnnnnnnnnnnnnnnnnnnnnnnnnnnnnnnnnnnnnnnnnnnnnnnnnnnnnnnnnnnnnnnnnnnnnnnnnnnnnnnnnnnnnnnnnnnnnnnnnnnnnnnnnnnnnnnnnnnnnnnnnnnnnnnnnnnnnnnnnnnnnnnnnnnnnnnnnnnnnnnnnnnnnnnnnnnnnnnnnnnnnnnnnnnnnnnnnnnnnnnnnnnnnnnnnnnnnnnnnnnnnnnnnnnnnnnnnnnnnnnnnnnnnnnnnnnnnnnnnnnnnnnnnnnnnnnnnnnnnnnnnnnnnnnnnnnnnnnnnnnnnnnnnnnnnnnnnnnnnnnnnnnnnnnnnnnnnnnnnnnnnnnnnnnnnnnnnnnnnnnnnnnnnnnnnnnnnnnnnnnnnnnnnnnnnnnnnnnnnnnnnnnnnnnnnnnnnnnnnnnnnnnnnnnnnnnnnnnnnnnnnnnnnnnnnnnnnnnnnnnnnnnnnnnnnnnnnnnnnnnnnnnnnnnnnnnnnnnnnnnnnnnnnnnnnnnnnnnnnnnnnnnnnnnnnnnnnnnnnnnnnnnnnnnnnnnnnnnnnnnnnnnnnnnnnnnnnnnnnnnnnnnnnnnnnnnnnnnnnnnnnnnnnnnnnnnnnnnnnnnnnnnnnnnnnnnnnnnnnnnnnnnnnnnnnnnnnnnnnnnnnnnnnnnnnnnnnnnnnnnnnnnnnnnnnnnnnnnnnnnnnnnnnnnnnnnnnnnnnnnnnnnnnnnnnnnnnnnnnnnnnnnnnnnnnnnnnnnnnnnnnnnnnnnnnnnnnnnnnnnnnnnnnnnnnnnnnnnnnnnnnnnnnnnnnnnnnnnnnnnnnnnnnnnnnnnnnnnnnnnnnnnnnnnnnnnnnnnnnnnnnnnnnnnnnnnnnnnnnnnnnnnnnnnnnnnnnnnnnnnnnnnnnnnnnnnnnnnnnnnnnnnnnnnnnnnnnnnnnnnnnnnnnnnnnnnnnnnnnnnnnnnnnnnnnnnnnnnnnnnnnnnnnnnnnnnnnnnnnnnnnnnnnnnnnnnnnnnnnnnnnnnnnnnnnnnnnnnnnnnnnnnnnnnnnnnnnnnnnnnnnnnnnnnnnnnnnnnnnnnnnnnnnnnnnnnnnnnnnnnnnnnnnnnnnnnnnnnnnnnnnnnnnnnnnnnnnnnnnnnnnnnnnnnnnnnnnnnnnnnnnnnnnnnnnnnnnnnnnnnnnnnnnnnnnnnnnnnnnnnnnnnnnnnnnnnnnnnnnnnnnnnnnnnnnnnnnnnnnnnnnnnnnnnnnnnnnnnnnnnnnnnnnnnnnnnnnnnnnnnnnnnnnnnnnnnnnnnnnnnnnnnnnnnnnnnnnnnnnnnnnnnnnnnnnnnnnnnnnnnnnnnnnnnnnnnnnnnnnnnnnnnnnnnnnnnnnnnnnnnnnnnnnnnnnnnnnnnnnnnnnnnnnnnnnnnnnnnnnnnnnnnnnnnnnnnnnnnnnnnnnnnnnnnnnnnnnnnnnnnnnnnnnnnnnnnnnnnnnnnnnnnnnnnnnnnnnnnnnnnnnnnnnnnnnnnnnnnnnnnnnnnnnnnnnnnnnnnnnnnnnnnnnnnnnnnnnnnnnnnnnnnnnnnnnnnnnnnnnnnnnnnnnnnnnnnnnnnnnnnnnnnnnnnnnnnnnnnnnnnnnnnnnnnnnnnnnnnnnnnnnnnnnnnnnnnnnnnnnnnnnnnnnnnnnnnnnnnnnnnnnnnnnnnnnnnnnnnnnnnnnnnnnnnnnnnnnnnnnnnnnnnnnnnnnnnnnnnnnnnnnnnnnnnnnnnnnnnnnnnnnnnnnnnnnnnnnnnnnnnnnnnnnnnnnnnnnnnnnnnnnnnnnnnnnnnnnnnnnnnnnnnnnnnnnnnnnnnnnnnnnnnnnnnnnnnnnnnnnnnnnnnnnnnnnnnnnnnnnnnnnnnnnnnnnnnnnnnnnnnnnnnnnnnnnnnnnnnnnnnnnnnnnnnnnnnnnnnnnnnnnnnnnnnnnnnnnnnnnnnnnnnnnnnnnnnnnnnnnnnnnnnnnnnnnnnnnnnnnnnnnnnnnnnnnnnnnnnnnnnnnnnnnnnnnnnnnnnnnnnnnnnnnnnnnnnnnnnnnnnnnnnnnnnnnnnnnnnnnnnnnnnnnnnnnnnnnnnnnnnnnnnnnnnnnnnnnnnnnnnnnnnnnnnnnnnnnnnnnnnnnnnnnnnnnnnnnnnnnnnnnnnnnnnnnnnnnnnnnnnnnnnnnnnnnnnnnnnnnnnnnnnnnnnnnnnnnnnnnnnnnnnnnnnnnnnnnnnnnnnnnnnnnnnnnnnnnnnnnnnnnnnnnnnnnnnnnnnnnnnnnnnnnnnnnnnnnnnnnnnnnnnnnnnnnnnnnnnnnnnnnnnnnnnnnnnnnnnnnnnnnnnnnnnnnnnnnnnnnnnnnnnnnnggaggggttgatgactcccagcaggagggggaagtgaaggccctacccatgtcttattaatcactgctgaggccacgggctcccccagctctccagggagccagggtgtgagactgctgcagctctctccgccttgcttgggatgtctgtctctacctcctgtgctgctgccagggctttatctctagaccttctatcctggcaggcagccggatggtagaaccggagccatatcccttgagtaaaccgctcctgcttttataggggcctgtggggcgcacccttgccagagctggcctctccaaggaggaggcctgtgcgacccatgggagtgtatagagggcttggttgttgttgttgttttttcagagtctctgaatatatagttatatcaagtgactctgtaccaacccctggttggtttgttggaaaagtcataactgctcattggttgaggatgctgttagctcttggcttctcgaatgtggtttttgtttctgtgaggagtaaggagatcagacttgaacttctaggaaggaagcttttgggtagcagaagcccttctgtgtgcgctgagagaaaaacttcctgtgtgaccctagcattgtcctcactgcctttaatcctcttgggtcaggactcaagaagtttgaactgtgtctccataaaagatatgtccaagccctagctggtcatacttggacctgtaaatgtgaaatttacacgaagggcatgttcactgctataatctaatcagttaaggtgatcttactggatcagggtcaaccctcatctctgtgatttgtgagtttgcttgtgtgtgtgtgtgtgtgtgtgtgtgtgtgtgtgtgtgtgtgtatgtgtgtggtggaatgggtgcacatgtgtgtacatttggagccagatgtcgaccctagggcctgcctccatgggtgtgtgcatggtgtggtgtgtgcacccatggaggcccgaggaggacagcgggtgtcccactctaatccctttactagcgcctttactaaatgtagacataggctgacgctagcaagccccacaaagccctctgtttccgctctccatggcaatggaattaaggtgtgcacccggctgcatccagcttcttatgttcgtgctggggttggattgagggccttatgcttgtacaacaaaccttacccactgagccatctctccagtctccaccttgtattttgagacaaggcctctgattgacctccagctcactggttggagtaggctgcctggttagcaggagctaaggatccttgtctctgcctccctggtgctggggttgcaagtcatgtgactctttctttttaactgtgggccttagggattgggctcagatcttaatgagtttactttgttgactgagccatctctctagtccctgatctgtgtcctgtttccctccaccacacttagaaaacaaacacacacacacacacacacacacacacacacacacacacacacacacacacacacacgaaaactggggtgatgttcatttaaaccaagggatgcctgggattttcagcagctactaaaagctagaagtacacgagagagttttccctggaagcagccattcaacattctgcctttaaaactcttgactcttgtgtcaacccactcggctgcttttagttgttgaacagcctgtgagaatcatcagccactaaccctgtttttccagggagcacacaggactcagaggtgttacgcattctgccttgggtcgttcagcactcatgcagaaacaaatgattgagggtgcctgatagtgctaccaggtctgtgccctcctttccactgctgagcgggctcagcggtggcttactgatgctggtaatccaggacatcttaatgagcagtgtggtctcagggggaggctctgagtgtgggtctgcttcaggtctggggtgggggctgatgttccctgggtggcttgatgggggggggggttgcttttgttaagcaggcacagccttgtatcttctgtacagaaggtctaagtgtggggtggagactgataccatgggccatatttcagtgaagctggggcaaactgagcctagggcctattctgtggagtcagactgcctgcctgtctcagtctgcctggagttgggaaaggtgaaaattcacctctggcttttccaatgcaacgaaagtaggggttgtgatttggaaaggactttggaacaccagtagaggctttaacaagtgtgtgtgtgtgtgtgtgtgtgtgtgtgtgtgagacagagagagagagagacagacagacagacagacacacagacagacagacagagaaagagagggacacagacagacaggctatgaacacccttgggtgtctgtcctctccttccactttggttgaggcagggtctcctagtcaccacacgagcaggccacatgaccacatgagtttgctatgagcctctggggctcacttgtccctgcctcctttccatcaaggtgaagagaaaagagaagttacagacgccctcctgtcatacgccactaccgtatcccactttacgttggttctagggttctaaagccaggtcctcgagcttacactgcaagcatttcatttaagcaccatcttttggggggtggggaggggatggggtcttatgtagcctaacctggtctgaaactcgtctgtgtagcaaagatgactgaagtcctgctcctcctgtctctacttcttgagtgctaagattacaggtacgccttgccatgcccagttttatgtagtgctggggactgaacagagggtttgtgcaccctagggcaagcactttaccaactgaactatactcccagccccagtgcagggttttttttttttttgttttttttttttgttttttgtttttttttttgaggtgactaacatgagatattggccattttatgggctgagttgtatgtcccccaaattcatatggtggacctaaccaccaatactttagaacatgattctgttggaaacagagccactacagaggctgtgaaggcaaaccgagagagaccatgtgactgagctctagtctagtgtggctggtgtctaaaacagggcatttgggcatgcgtagacattaaagggaaatggccagagggagattggacaggaaggtggttctctgctaccagtgtatgagtttgggggatcaaactcgggccattaggcttggtggaggatgcctttacctgctcaccgttctccaggccctctcgctattacatttctctgagacagggccgtgctctgaagctcacattggcctcagacctgtgatccctctgcatccagcctctcctgagctctgggatcacagcgctgtgccatctcaacaggctagtgtggccatctcttaatgattggttttgaaattggctacataaacaatggtacaagatctgaaagagagcataggcaagaagtacttccctttctcaccctgccacaccctccccagcttttcacaccgaccattgctagagaatcaacccttagatgctgagtgccattaaagaggaagctatttgtgtaccaccacgcaccctcttttgtgtgtgtgtgtgtgtgtgtgtgtgtgtgtgtgtgtgtgtgtgtgtagggagtcccaatgcagcttccttattaattattttgttctgacaaagaacaactggtttaatgattttgatgtgctcaagagcacagaatgaaacctcctgttcctctgacccagccttcccacatacctccctgacggtgtctcaattttgattattttttattagttatttactaacagatttcagtgatttccctgtcagggcagagaggaattcctcattctgtcttttgagcccctgaatcaggcgacctctccatctgatttatatgatttatgttattctactatctggatgtgtcatcatacatgatcatgcatgttcatacacagtggtcccctatgggtaggttggttggtctgtatctttactactgcctggtctcattcatgtgtcattttgaatatccctaggggaggaattgttgagcctgggagcaaagagcctttgtgattttgatagctgctgcataagtgttgaacagttataactgagaagttgtacccattgatccccaccaggagaaggtgagggtgccagctccctctactgcctttcaagctagtgtgaacacatcccatcctacttgggagttctatagtcgctctagtgagcaagcatcttttcaggtctaaaaaccactgttgtttctcttctacaagctgctcatatcccttctgttgtgaaattggttttatctgggttctctcttattgatttgtgggaactacttatatattaaggaaattagccgtttgtgattcgagcttcaggcaatatttttctctttaatcacatcccttaatctttctctcatggtgtctgggttttctctcatttcttccctccaaaatcccatagtaaaaatcttgtgttttctcaattgggttgatttttttcatattcaaagattttaatatgtagacttttccatgccacttttgctctgttctgttgatgagatgaaaactaaaggtccctctacatccaaaggaacccagtgactaggtgtgatgtgtgagtgaggggaatcagaggaaccaggtggctacactgtggtgactgtcattcattggaagcttgtttctgttcactgttgacctgtggtcattttctactgcagtgttagcttgtggccactgacttgctatcttgaggagcgcatgtgacggatcatctctggcttctggggccaagagtttggtaacatccagtttcatctgctgctggccagctgaaggactcgcattagactctggggctgctgatagcttattcccctgcaggctctgggtaaagggattcactattattattattttccatttttcctgtgtgtgtattttacatttgtgtacatgcatgtacaggtactcgtgaatgtacaggaacatgctcctctgcgtgcatgcatgtggaggcccaaggttgatgttgggagtcgtccaccatcactcttccaccttatcctttgaagcagggtctctcactcaaacccagggattgccagcttgctctgtgctgccttccaagcgctggccaccactcccaccaggcatttatgtgggttctggagttttgaactcaggtcctcatgtttattaagcaagcactttaactgctgaacaatcctcccagccccaagggcctcggttttcttgctagctctctgcaagccactctcagttccttgacatgtgctttcccaacatgatgtttgtttacccaaatcagtaagagattcgaatgtgacagagctgtgtcatgtggctcttctgtcctgttctcattatttgctgattagagaaaagctacaggtcccatccacattctgggatccacaagagagcacatagtgggaccaggagaccctttggcagctgggttcatccttcgactgaacctgacgagagctcccttctgacctgaggcacgtagtctgacatgacctggaaagagtttgggtgtggtagaacttgtagcctactttcttgaatttggtcctgaaattctgtcttatcacgtcaaggattcacaagtaggacttttggggtgcttctctgcctggaagtgacatcagtgtcccactgtcacttgaacatgtcatcccggtggagtgaagttggataggctgtggaccatctgaggtgtggatgattcttatctgtcagtctcctaaaagaacaagagcagacagaacctactctagaaaaggatggggactctggactgattcttgctacattctcctaactccatttagctgatcagagattaagaccaaaacacttaaaaacaaaaaagttcctgttctctcaaagtcattgtggattgattggtctgctgagtctgaaggcttaaaaatataacttaaaagtagataaattataatttataatctaaaagtaaatgagaaagtacctaccagagcagggcaggcagtaggtgccctggcacagctgacatcaaaggaagccttgggctactggtaatgagaagggtctggatgctatcagatgggaggagctagcgggtgtggtgatgggggagtcccatttccctaagaggagagggttctgggaagggtctccatgcctgtgtcttggagaagaaatggggtggtctcaaaacaggggagtacctggcttgggagagggagtgttggtaaagaccagaggtggtctttgacctgtagcaggtgaattgcttcatggcagagtcaggactgggaattgtgcagtgagatcctctgtcccctctcttctgaggaggcttagctgtgtgtccagggcccctggagattcacagatgtcctgtctggaaaaagaggtctgaaggatggtggagtttgtgtctccatacagcaagtaagtgaagctagtagagttgagagtctctgagagaggtggggttctggagaagagatcagggtattttcttggattcaggaaggggatgttagcctatccggtttacactcatttctacctctctcctgggtcagcaggaaaatttcatttcatttctcaccaaagttactgtgtcaaatacttccctccaggaacctatcttagtggatacagggatgtggacttacaaatgttggtagtgctactcagcctcataagattccttttcctaagaattgaaacagattcttgttgaattgaatggcaaagtggacaatgcctttagcagtgtgtgtgtgtgtgtgtgtgtgtgtgtgtgtgtgtactcatgtatgttgctttggctttttgtttctcttgaagtcttggaaatacttcttagaacatatttatggtagtggctctcaaccttcttaatgttgtacttgtgactctttcatacagttcctcatattgtggtgaccccccaaccatacaatttttgttgttacttcagaattgtaattttgcgattgttatgaattgtaatgtaaatatctgatatgtagcatatccgatatgtgaccccaaagtggttgagacctatagtttcgaaccactgatttatagcatgtccttcgggtgctattgaaattcaagcttaaattttataatgcactgtacagaaaggaaaagtacttcactggggcatgtgttttgctagttgagtggatttcaggccatgcttagcagtaagtcgtccatggtagcatcctggctccattctaccagggacccaggctccctttcttatgtgtttctctgcaggctgaggttgctgcttgagttcctgccatgtctgaattcaagctgaagaaaggctgtagaagggggagcttgctcttcaggatcctctctggaattctcccagagagcttctgctcagtcccattggccaagcattagtcatgtgtttatggaccgtggtaaaagctgggagaatgggtaaaaccggaattctcagtcattacagagtaaacagtgtactcaggggctaatcgtgaggagattatgaccaaatacagatgtttacttgtgctgacttgttttaagaaaacttgcttagttatgcttttattgttgtgaagagactccatgaccagctcttataagggaaaatatttaattgggactggcttacagcttcagaggtttagtccattatcagcatggcgggaaacatggcagcatgcaggcagataaggtgttggagatggagctgagagttctacatcttgatcttcaggaagcagaagaagactgtttcacactgggcctgccactccagggatacacttcctcccacaaggccacacctacacaagcacagctcctaatagtgccattccctatgggccaagtcttcatacacatggaggccattcctgttccgactaccgcagtgtctaggcatagaaagaagacatgcatcactttcccaagaagaggtgatagagaaggtatcctagtgaacctaggtagggccggacccaatggtgcttctgccttaggctgtaccagtgtgcatccttggatgttatgatggttaatagtgtctgctcaacaggatctagaattactctagagacacatctctaggcatttctgtaaagggtttctagagtagcttagtagatgtgggaagatcgatcctgagtgtgggtggcacattggttgtggtccagaactgaattaaaagaagaaatcaagggctacactattacccatcatcctctgcttctgactgtgggtacagtataacagctgctctatgctttatctgccttgcctctcctgccaccgtggactgctcgtccttgaattataagctcaaatgggcccctcttccctcaaggggcttcttctcagtgtcttagttaggatttctagtgccatgagaaagcaccatgaccaaaagcaacttggaaaggagagggtttatttcttcttagaactctcaggtcacagtgcatcatcactgtaaggcagggcaaggacagagcggtggaggagttctgcttgctcctcatggtttactcaacctgctttcttatatagcccccaccttccctggagtggggcctctgaggctgggtctacccacaccagtcattaatcaagaaaatgcgctatagacttgtctacaggcgttctggtgaaggcattttctcaaggtgtttcaccctagatcactccagcttgtttcaagttgacaaaaaaaataaccagaactacaagcaacaaggaaaatgggtaatattgatggggtaattttaatcaacagtagaaatgtattgctcatggtctgaggctgggaaggtatactatcaaagcagcaggcgaaggggaaagggcacctttaagtctcaaataggcactagtcatactgaagccctcataacctgatcatctttcaaaggtgtcacatgacaacatgattgcaggagtgggatttcaacacacttttggaggaacatccagtctgaatagcaggaccttactgtcggggctagaggaagcaaatggttgattcaaacccaggttccagattctacagttaccatggcgggtactctgggatgtgaatgctggtttgtagggtgttcctgaagcattgtgggagtcttctttttttagtgatgttgccacaccttgtgatttctgtagaatggtgcagttaagtcagatgctttaaaataatcgaaggctcaggctgtagagatggctacgagggtaatagcactggcctctcttccagaggagctgagttcgattcccagcacccacgtgtcagttcacagtgtctgtaactcccattcttagggagtccgggtacatcaggcaccctatggtacacagacacacatggcaacaaagcatgcatgcacatgagataaaataaatcttaaaaaagcgactgggggctctaaaaatggccgagggctttagaagaggaaaggaagtaaccctgacagggtgcagtaggaatgtgtcacagatgttctcattcagacgaatagggaggctgccggcctctgaatgactgccctatttgcctccagcttccttcctttaaggtttgagagctgagactgtacactaaacctcatgtccagcctctgtctagagggtccagggacgagcagcctcgcccattcttggtggcgtccatgcggcatgtgcctctcagtggtttctcgctcttgccagcagctatcctccatgtctgagttccttgactcaagacagggctgtggcttctttgctttggggtcccagctctgttgtattttggacacaggttatcactagtatcccagatgtgaggatccctgtgcaggacagcctgggtggcttgtctgatgactgactgtacctgagcctgaggcattgttttgcctagagcaggttatgaagtgggatcagggcacatgtgaatttccacgctcgtgggtgtcacgtgggagttggtggcagacagtgtcctggtttaaattacattcatgcttcaagggtctgagccgcttgagagctgctgtccctcactgggctcgtttcagctttacttgaacggcttcaggcttctctgttattaatgacactaggacctccgcttggagacggctctttaatgaggctgcctgctctcagctgtacttcctgtcacttcagtcagtgaagaaagctccactccaggtttggagtgattgtggagggtattgggttctcaaccgtgatgaggaaagataggcagaagaggctcagcctatagaagctgcactgggtaccaatcccagtcccaggcccagacacagggagatgcggtaccttatttgagtgacccagataagcggcctggtcccagtggggacactgctgtattagaacttaccacagggtagcccaggccgaatgttttggagatccttgctaggaaacaacagtggatgcaggtcttaatttgttccttccatgtcttggctagtttggattcaggcagcttagggccttcctgactttgagaattgaagttgcggttggtttctttttatctctgagatgcttgtgagtgaagggtgttggggtgcctaaggctgagagcgaggtggaattggcaggtaattcttgggttaggaaacatctaatgagtttgaaagcaggtctcagaacttctgatctgtgtgttgggttggtggtatttattggactcttcctaaggcattgggacagacagagttaacatcaagtcaagtcgtgcctgtgcactttgctcaacagagaacttgtaaaaactttgggacttttgtaactctataccgaggtggtaacatcctctctagggacagatttgatgagcaagcagttgtcccatcgtaccctgtcctggaaccctggcttcaacctgactggcagcttcctagtcaggtgtaccatcttcctgtctcattgaccatctctgtcaatgtgcagtttcactcagaatgttagacagaggccccattaccctctgctagaagcagcctttagctgcctcctccttaaaataacagggtgatggaaattttttttgaaagtggagcctcctaattgaaccttaatttccattgaagtatttttataagatttatagctgtgtttagcagctctctaatgacactactgatttgcataatgctgattatccaggcaattcaaagtcatttatagctgtgtcttcatcaccaggtggtggagagtgccccatttcattgccagggaaattgaggctttttatacagaaataaatgagccatgaaaagctcatggaggtgaattattgagcatcgtcatccctttctctccactgttgactttgtgaggatggggtgttcttgaggagccggtcctctgccttattaggcactaagtgagcttgaattatttgtttcggaaatgggatttctgtctctctttatatatgaaatggaaattctggctcctttagctcccccactatgaaggttaatgaatgaatgtgaactttgttaaacagtctaggagaacgacactatgaaaaatgtcactttattaatgataaacttcagttctggtgtggggggcccatgaaagtgtttgctagttttccaaacatgttggtacgtcctggtctgcttactccccccacccccagccctgctaagaacttcccttatggtattcttcccaggaagctgatgttttgaaagagcccgttaccaaatcacagttattaaataataattcgtattgtgaaaacagcacaggaggatatttatagctgtgagtttccagtggaaggaagcagttgttaccacacaagcctgtttttgtttccgccaagaacaaagatgtcagatgcctgacatttaggcaaatggacaggtttgattgccgcttttgaagtggtcttgggaatttctggcagtctcaacttgagtctgcaaactcaagtctggaagctactgtgagactctggtaactgcagagccaccaggggagtgaaggtgttatattggttttagcttttgggaaggtattaaccttcctgttatctgaggaagcatgttgtaggacccccgagttcctgaaatagccaataacagtacctgattcttacgcactggcagtgcagacagagtggaaatgcaggacaaagggcgatttatgacctaggcaggacagagtagaatggcctaaggtcatcacgttactcagagcaggaacaccatttacaacttcagaattgtttacttctggaattttctgtttaatagtttcagactgtgttgggccccagctaaccttggaaagtaaaatccagggaggacttagtacaagaaaatctgataggaagacctgtctgggactggtcacctgcagcggtgacttggcactgttcatcccccttctcttccttgcccatagatattacgtcacactttagggggatcagagctcagcaaacaggctgagacccagggaagtaggtgtgcagagcatcttgggaccagaactgtgtcttctgttacgcggctgggtgacttttttcctggtcgtgtaactgttcagatctcagttttcttcatctgcagagttgaggcaatagcttggtgagtggttttgaggattaaatgaaattttggttttaaagaagaaggcagtgtaccagactcttgatattaagtgcagagaatgcctgttagagctgtcacaacttgacggtaggtgcacacctggttcccatgtacttatgctcctaagagtatattctctcatgtttgcttagatttttttttttgttgttttgttttgtttttgttcctttttgaggtaggatctcatgtgtcctagtctgacctcaaacttgctgcatagcagaggctggccttgaactcctgatcctcctacttgctgggattacaaccatgcagttacacactcaatttacgcagtcctggagagcaaaggcaggactttgcatgttagacaaacactctgctaaccgagccttatccccagccccagtcacgtgatcctgttgctgtgaccttcaccttcctcccagggaagggaaatgaatttcttcagggccctctatctacctgtagctttcaaatcaccatccatgcacacaccaagcacgggagagagaccatgggagttcaagggtgtagacatctcccaccacattggccttgccccacccttagcaggagccattgctgcttttctcggcccagtctgtcagtgtaacttgtgggtgagtctcaggtgtgcttttgatacttttgttgcaagtcaagttcacacacctggcgtttccactaaaaactaatagaggtctttcttgcctggcttcatggccttatagctggcaccttttggtctctctactacaggttttgctgtagcctgccggggttagtcccacagtctaggtcaagttggctcacagcaaggtataataagccctggatagaaagggactgtcacagagtagcacatgtaggggtttaggcagtagcaaattgttcccctttggttccagacgctgggagtctgaagtcaaggttgatgtcttccatgggtcacgtgggagaatctgttttacttatttcccagtttcctggcaacctttgccccatcttggcttgtacccccaacagctcggtctctgtgctcacggatgcagtgtccttcttccctgtgtggcctgtgttctcatttccatctttctgtggggttggtgtagtccagtgacctccctttaacccgctcacctctgcaaggctcctgtctccatctgcagctcaggattccaactcatcattttcaggcacctcttgctcatttccacaatgtaacctgctcaacaagctatgtgtttttcaggaagggcacccaggaggagctgccgcctgctccaggggtctgccatcttcctttctttcttcctgtcaccatctttatgcagtcagaacacagctctgctctctctacagtatccctgtctttgcaatcacaacatcctgtctgttctcttctttcaaggtcatcttccggaacaaccttgtgcatgattggtcctgggtactccttttgaattattcctgggaccctgcttgttcatgtctgtacttttgagccttgctctctcacatcctttgtaggtgcttcaaagataaggaccatttctacttatattggcatactgcagaacagacttctacaaatgagtgtacccatttctttgtactttcttgtaacatggctactagaagcctttcattaaatatttttgcttgcttcatatttctgttgagcagctttggttactgctttcttctatccatctagaaaaatctgcatgggccagctccagcctgaggctggacggaatgttgcttatcagattaaatggcagcctgctcaaaagacttatctaccaaagcccatgaatcagacttatttggggaaataatttaaacatgttgacataagatccccctggattatccaggtgatccacaaagccacagcaagcatcctttaataagatcaggcacacacagaaggtgtaatcgtcagagccggggcagaaattggactgatccatttataccaggattcctggccacctccagagagaaaggaaaaaactatacccccttaaatcttccagcaagaattcatctgcccagacccccactttctatttctgtcctttggaacagtgagagggcaaacatctgttgtttcagtcactcagcttgtagtgatttgttatggcagacctggaaagtaggaggcggttgtgtccccaaacctgggcgacacagagagaactctgaagggataagaggaagggccgctggaatgaggcaggattgccacagatcactagctacctgttgttctagaagccaccagtgggatgattatatggggtgagaaagtcagtggagagagagttcctgtgcgcggtgactgtggatgtctccggatgttggtggctggactttataagacagtctttgagtgaccttttttgggtcatctttctatttgtattgttggctaagggaataagaggactggtaattctcatctgagaaagccccccccccccatttgatgagagatctgttgtcttcctgatgctcattaaatacttgttaaattggatcgctctgtttttaaggaaaacagcatgccatgctagtttatctagagattttgggctcccaccaagaattttataaagcgacctcacactaattacaagataaacatctctagccccacgtgcagcaggcttactctgccagtggccctgttttcgcttactgggaagagaaagaacatttgtttgctggtctagagtgcagcaagcattttttcagagtgattttggttaatcctcaggctaggtctgcaagtggtattatcaccctgctttatagataggggatcggggtctctggtctctgagagttgtagaaacgtgtccaacttgcgtagtaatcaggagagctgagtcctattcaggcaaggggccttctctccaagggaaccttcacatagcgctaagtgtgtgcaatagcatggagtgctttggatggaatgggggtgtgtgtctccagttccccactctgtcgcccctcaaagcatcactacataggacaccttgaggccatgctcttcacttggttcttgctgcaccaccctgctctgatgctgtttggttttgcttctgagcttttcacatgtagtagactctaggagaatatatttctgcagattcctgcggtatccctgcttagtccttggactttctggagattggcatggtaatagctaaaactctgcctctgggtcttacaatgattgactttgatggaagatatttttgtggagttcactttgtggtgtgagaagagaacagattctagactattgcatggctaagggaagtggcagcgaatcgcatcccagatctcctgtgtagaaggatggtgtccgatggagatggtgtttgatggtagggaggtgcatatctctgagtctatggagaatacggtgctcatgtgggaaactctcgtccaggtgaagaaaaatgtatgtgaagaaaaatgcaggcaagacagtttctgctccttacagggccttctgggtagatttggagggtggcaaatagcctaggaaggaacataattccttatgtgatgctttatggacgttattggaaccaaccctccctctccttctttttgtatggatgtaaagacatcattatatagtgttgtaaacttctttttacgagactattcttgatgctcaggttcaaagaatgatacagttttatcttagaattgctctattatttatggttagaggttcatataaggatgtctgttggattatgttttagtcaggactgtatagtccatagctgcagtaacatatttctcctaaagtttaatgacttcacttgatgaccctggagactgaatgggtggtgtagagcaggggggtggggcgtggggtagggcgttgcttctgttccccatagttgctttgatccagttggttgaggagccactgtctggagcaatgccacagcagagctgtgctgtgctgtctcctttagccttcgctttgtgagtgatgcctatcatgttagccctcactccattgatcaaactaggtccatagtcccacctaaccgtggaaaggaagcggttccccaggtcagtcggtgagaattacctcctgtcactgctaacacagtgccctgctatcgaggagctcctgagtgacactcagtgctgggctaagaactgggtgaaaagattgaagcttgtgttcctccacatcaagtggctctcttccccctcacaccagaccgtcccacactttttagcacttagcaaatgagatgttgactgaatgagggctttttaaaaattattattattattcatagtcttgaaagtctgcctacattgctacctgggtggaccaagtactagctatgacaaatttgtgtgttttactaacatagtccctgcaattttccagggatagtctttacaccttctcacaggagacttccgccttgtttgtttcggctttatttagaattagagaacccagacccaaattctagttctttacttttcctgtgtggtaggttgtttttatttatctacttctttagttttttaaacaaacaaacaaacaaacaaaacagagtctcattatgtagcactggctgtcctcgagcttgctttttgtaaaccaggttgacttcaaactgagatctgcttgcctcagcctcccaattgctgatgttaaagtagtgtacatcacacccggcccttgccgtgatttttgaattggctccttattcttaagtttcagtgtttccatttatagagcagagtagggtggatataggcatgcaaatgccactttctctggcttttcacaagttttaatcagttttagtcttctaagggtgtgatgacaaattcttacaactgggtggcttaaatacttttgtggaaagcagaagtctaaaatcaaggtgtttgcagggttggctttcccagagagaccccaggctttctcctgtcttcctctcttctcccagaccctccacccccaccccaatcctggcttctgtgttgatctcctactttcgcctttctaggacattctgcagtgtgtgtgtgagtgtgtgtgtctagatttccttctctctatgaggataataattattagattaggaactactccattgcattatgacctctgtttttgtttttgttttgttttgtttttcgagacagggtgtttctgtatatccctggctgtcctgaaagtcactttgtagaccaggctggcctcgaactcagaaatccgcctgcctctgcctcctaagtgctgggattaaaggcgtgtgccaccaccgcccggctttagctatcataaagtcacagttgacggtattggaacttaggctgggaatctatcttcttggggaactacatcctacttactccaatagcgtagctgaacaccaacagagtgttcccattacagtatgtccttagtaagtgagagtcgcgtcttcccccaacaccccttcttgaggaagagcccttgggaaagccctcacagaacttttgaactaaagtttgctgtcctttcaagcctttgaggttactgtgtcgatcaaaggagagtgatttctgttgtcccctggtgatacacagctcttagctggggttgcacactcttcctgggtatatatgagaactgtcatgcatctctattatggaatatgcccagcatttggatttcaagtgactatagcccagtgctgtcatggtttccttcgggcacttttgtcttgcttaacgatgcaaaacagaaaatgcacacaaatggttcctcaaaatgaggcctatcgttattgcttcttttacctccagggcctcatagtgcaaaagcttattcactgcaaaacaatgaagcctctaaatctcccgccttcatattttccattccatattacagtcgaacatggtgaaattaattgtggccaaggcagagacgacaggaaaaacctataatggtttatcatattctgtaggctttgtgagggctgtaaatttaaggcatataggaattgtatttattcttcaggttctgcaaattttttatgttgcctttccccccatggaggtgtgtgtgtgtgggggggggggcggggaggttctttctggataagagggaagggggtcacttttgcgttgacaaagaagagagcagtcagagagatgttcccagtgttgcagacccctgcagagccctccctcccaagcttctccagtttcatgactgttaatagctgaattattgatgctggttagctggtggtgagagctgcttctgagacagcctctacccttacatcagctctttgatagcagcgattgtcggaatcacattccatagggagaagttataaattgaataggtgtgtgtgtgtgtgtgtgtgtgtgttgtgcacacatgctcacagcaggaagacctctgaccatatgtctgtgtgtgtgtgagcaccctttgtctaaccttgtagtgtagaaatttacatcctttgatgggagcaggatcattgacattaccctattaccttgagggtccacaactcttcctgacatggaactgctctggtgtcagtccatgtggacagtgaagatgctagaggccgaagttctatgaaattccccattcttaggcatttggagaagctgttttagctacggtaatccctagggctgtgtgagtatggacggggcctgagtcatggtcttttgtcattgctgcctgcttgtttacttttgagacagggtcttactatgtaactttgctgacctggaactctgtatgtagaccaggcatcttgaatacgtacaagtgcagttgcctctgcctgccatgggctggtattacaggcgtgtgccatgagcctgtgccaagagccaggaatgagttcagggtctttattctgtttagaaagcagaaatccaccaacagaattaacacaccacacacacacacacacacacacacacacacacaccaatggcatagtgagtccttgggatgctgtagctcacaggcttcagacattccgacagtgccccataggtacacatttatacattcacacaaaaactcttacgtgaatggttcacggcagcagctttcacacttgctccaaagtgaaagtgcccactgctgtaagaatggacaaatacagtgaggtacctccatacggtggaatgttactcggccagagaatgaagcaaagtaccgaaacctattgaagacgggcgtactttgaccattggtaaaggaaagaagtcagttacaaaagaccacgattttctatgccactgttgtgaagatatccagaatcggaaaacccgttgagacagaaagcaagaggagggtgcctggaggacttgggggtgtggaaggaagtggggcgtggccgacctggtgtaaagcttccttctgggcttttggaacgctatgaggaaggctgtagtgatggttgtatgaatggtctgccttacattgtgcagttgaatagtgtatgaattttatctcagtaaatctgtctaaaagtcacatttaaattgcagattagaatattatataaaaactgaattaaaagatactctttctgttcctaatatatttagatttattctaatatgttcccctccatgtctttaaatgttgctgaatgtgacccatcatgctgaatccagaatccatatttttatacatttttctcctttttacagacgagaacttgagtcccagagcgtcaggatggcaagtcttactcagttgattagtggtggagttgagactgcagatggtgcttcccaagtctcatttctctgtgctcccggaagcttgggggttctgcagtatgggacagtgttggaattagtaaaggttctggcagtgagggcgggggagatggcttgtcagtaaggtcctgagttccatatttcagggtccacataaaaaaactagagaggtatcaagcatgaccttggtactggagacggggaggtgggcaggttgtaagaagtgcattggactccttggcaaggtcaaggccaccaagacatttgtataaatggtggaggcacctaggtgatgacaccccaggcttccctctggctcctcccaaacatgaatgtatgcactgtcctacataaactcacaggaagagcaaaggtgctgctactgactagcctccttgcaaaccccctcctccaggggcctgggtgcgtagggagttccaggcatgtaaggacaggctccccttagcatggagtactgtgttccgtttagcacagcaggtcggtcgccttacttacagaggatatgcatttgtttatattttaggcaaagatactattttctcagcattttatagaaatgacattcagcatgcctaaatggctgctatttagatgacaggtgtctagctcgctcttccactgaaagtaaaatttggtataggaggcggtaaaaaactagggagtgtgtaagtggaaatgagggagaagagacacactggtgtgtgcccgaagctccatttggtatctgttaattgtggatagagatacaaagaaaagaacattttagcattactacagacttgggggtgtggtgggggctgcttttgaggggcagagaaagtgagatccataaacagttctgggttatccagatgtttgtgtggtgtgactaggacgagaatttgcctctagaagttaggagctgcttcagaaccgctcccacttctagggtctgagaggccattgcatggccaagtggcaaggctgctttgtttgtttgtcttttttttttttttccaaaatcaacttgacacaaggtggggtcagctgagaagaaaaccgcaattgagaaaacacagccataagactggcctgtaagctagcttatgggacacatccttacttgatgattggtgtggaccacatggtcctgtccattgtgggtagttccctccatggctggatggtcccaaggtgtataagaaagcaaactgagcaaaccaggaggagcaagccagtaagcagcgctcctccatggcctctgcttgagctcctgcctccaggttccttcttgagttcctgccctgatttcccgtgggtgatggattgtgatgtggaggtgtaagatgaagttagcgaagcaatagaaagctgacacacctagcatttgggaaaaactcctgcgttgttagctttgtgaataactatttgtctctagcagggacatttcttgtgctaagagacacccgcgatggattcagtgtttcggttcttgactccattatgaatgtagcactaataatggacccaagtcagagaggccaacacctttgctaagttaggagtttgagctgaggcttttaagtgggggaggactagccttcttctgcaggtctggcctgcagcaaggtctccttcagaactaaaaggaaaagcccacattgtctgattctgctgacagttggtctgcacagtttctgttgggcaatgatctcttcctctgatgaaagatagttgtctaattgaaagggcttgggacaggcatgcacagaaggaataaatacaaagatttgatgactaaaacaatatcggtttgattaaaagaggcaggctcaaccaaagtatgccatcctttgaactcccagtatgtcagcacagcccctaacccactgttgacctctgagacaagtctttggtcctccacgtgctccctatttacctgtgggagcacctatatgtgcttcatcatctgtcaaatgacaacagccatgtgcagagatagacagctgaaaacaaggtagtgaatacagacagagcaattgatcagtatcatatcctcaaaaacaaaacaaaacaaaacaaaacaaaaaacaaaacagctgttattttttttttttacaattaggtggtagaaattcccattttctggatcagaaatctaaagcttatgccactagccagagggttgcagcaatagtatggactatgctgagggctacctgggcatccatttgagattctaaggtctttttttgaggaagttggctcctcttggttactgggaccccggatcagtgtttgcctgtgtctgcgtattttattcccaagttctcatcctttaccttccacacccctcacctagaataactgaggccaaagagatgttctccgcgtgttctgcctgtccaaatcgctgttgctactttctgtatgtgcttgccttttattctcagtgtcagcgaatataatctctcatagcagatgagggcttcctctccccagtctgatgcttgggaacaatcctggctcaccaaacgcccctgggcacagactgtggctcagtaccagattgatgctataaggctttttgccttgtctccttttagacattgagaattccctttttatcaggattgtatgtatacctgagtgtgaagactcagagcctagttagtggtcagactcctgtaaaacaacaacaacaacaagccaacaagcagtaacaacaacaacaaggtgccgccaacaacaacaacaagcaaaccactagcagcagtaacaacaacaacaataacaccaaaccaagcagcaatcccagaatgagcctctgagggccatcagccttggtctggaccttttgggctccagagaggccagagatgggtctgaagggctctgtggtttgtaagtgagctgttagctaatgggctttggtctagtggctgtaggagtctttggacgctatgtagcagtagtcagaaatttaaaggaaactcattactggagcagttattgcttttgttcagaatggctcatcccagtcaggccctattaaatacagcaatttaactgacacttagtgtctttagggggatgaattatcctttggcctggtcacctccactttgaaatttgatcattggtacatcgtggggagagctgctccggatgatgcatttgctcgggtgagcccgctatagtccttcattcagcacacgtttaatgggaaccacctctgcacgctacaccgagtggcgctctcatttctgatgaaaatgaagccagcctggacccggcaccgagggagctcattgatttcattcagtcagaaagtattgattggcacctactgtgtgtaaaacctgggcgtggtattgcccaagagcacaatggcaggctattgatagtctccttgcagtctctgtgagatagaaacgtcaggtgagttgcctgggtccagcctggaaccgagtacatttcctaaggagccctgggaaggcaggtccacaggagggtggttggattcaggggcaggacaggacactttgttgtggaggtgacttagtgaaccgcgtaggatgtcatctgttgtgatgataggtgagtgaggacaggggctggcacaagggatggctcagagccctgtaaaacaggcacagtgtgagtgactgtgctcccctgcagctgttagcaccaggtcggtcaggcccaagggagagttggcttttgaagtgctggaactagtttgcccagtacttgaggactgagtgttctagctggtccctccccatgtagaaataggctgtgaaagcagattagagtagaaaggagcttggagcaagatgggaggggttagtattccttagacctgaacaccagtgggtagaagttcaaattctctacatgtaaatatctgtgatttggctaactctcaagttaggatgacgacattccgaaggctgctggggaagaagtctctcagcagtgagctccacacgggcggaactgggcagttctttcagcaaatgctttgttaatttagtaatagggaatgatttcttctgaactctctgcctgtgctgagttactgtatgccagttctgtgatagctgtcaccttcattaaaattctaaatgaatggcatttatttacaccctcatttgtttagaaaatagacttagatggaaagaaaataaaaatcactagtaattgcaccagtcaaagtttgacaggctgcacttttgtcatgtttgatataggtatgaatgtgtgtttagttttaacatccattttccagtttactagagcaagcacttttctatttatgaaaacatttctaactggggatgtggctcagtagtagggtccttttgtagttggcacacagctctaaattgcatctccagttttttttgttgttgttgctgttttcaagacagggtttctccgtatagccctggctgtcctggaactcactctgtagaccaggctggccttgaactcagaaatccacctgcctctgcctctacctcccaagtgctgggattaaaggcgtgcgccaccatgcctggctcagttatttttaagatatgcacgtgcgtgtgcacacacacacactcacatgagagaatgagagagagagagagagagagagagagagagagagagagagagagagagagagaaaaatatttccctagtcttcttagccaatgtaattctcaggtttcttttctacagtctctattgtgaagataattggttttccagttgtcttccaaccaggagctctgttctgatactggttcagttttctgcgttgcacagttcagtgagtctcttgagtgggcccccccttccttctgtaggggtactttgccaattcatccaaatctactttaatggccatattgaattcagtccagccaacattctagaatttatttactcactctccaaaactgggcttttatgtccaagttttagtttttgtgagtggtgtcgtggtagcacatttgtagctctagttggtggataccttaagcatttcttcagattcaaagagattgcagaagctacatccatttctgccccaaggaccaagtggctctgaacatacacacactcagcacccagtcctgtagagcactgtgtctgccatttcttccagtgcatctgtgtggtcccttcagtgtctgatggggagtcagtacgccatgattctgtggctgctggtgctgcccccctgcaggggagcataggacatcttttacaagtccctgtggtccacatgatctccactgggtgttttttttctgtcactctagggtctcattggatctttaccagcctctcttgtggctcacactggagaggagcccattggtgtctttcctgctttaggacagcacaatgtattaaaaggtcagaaattcagatgaataggccccagagagatagctccattgttaaaatgcttgccctgtaagcatacgaactagagtttgatttcaagaatccattttttttttaaagccaggcatggcgactcctagtgctgggatatacagacagacagacagatccctaggactcactggccaggtgcctagcctagtgagtgagccacagaccaacaaggcaggtgacacttttttcaaggcacaaacctagagattgtcctttaacttccacatgcacaagcaactgtaccatacacacacacatgcacacacacatgcacacacacacacacacacacacacacacacacacacacacacacaaataaaaaagaaagaagaatgacagatattttcatcctggctcgcacaggcctggccagggcccccgagagctcacttaacccactgtccccaactttctagtagataagaactagggaccacctaaattgtaaggtggcacttgtgtcacggtttataggcacgccacaaatttattaagatgacttgtcttacaacagtgccaacttcatttattagctttctgccgcagagcaaccctgttgggttaccaccactttctgttaggtaaagccatacccaattccaattaagtcaaagaatgtctaatttcctgaagtcaggattgaggtcatagcctagagggctcaggaattccaagtgtaactaatccatcaaattatgattacagagaggaaataccctatcaatatccgatgtgctgagagggtcacctgctggtgaccaatcattctgaatagccatgccccgtctgagtggactgggctggtgtgtgtgtggtgtctcctaggtgtgagtcccattctggaactggtcagcttcctttctgatatcctgtttctgttgaaatgtgaagcacttgcaggctgctgtggcaaaaggggttggcttttgctccttccatgtcacctgtgcttcctcctgaagtccaaactccttcatccatggtgtgtgtgtgtgtgtgtgtgtgtgtgtgtatcttccaaaaggggggtaggatggagagagagagagaacagaagaggggaaagtgaaggggcagggggagagaaaagaggggaaggaagagagggagggaaaggagagagtaagaaagggagagatgggaggggtggaaaagagaggaaaaaaggagagggatgaggaaggaggaggagacagagagcatgaacattcgaatgcgttggtcatattttatagaatcttgccacattctgcttcttggagaaaatggcttatcttcagtgtcattgtccctattttatggggccatgctcctgagatggatcatcctatagcttccctttggctatagagaggacgacccctggctgtggtcccattactttacagctattgatagagataattctaacaaagtcgaaagtgaaatggaaacgcagtttaaacactctagtcttgacccagcaatggcctctctctccccatcctgctacaaataggaggcagggacctgataattcacccccttggtaattcgcatctaaccccagcagatggttttgtttaatccttttatttccccctaaatcatataacgggaactcacagattaggggagaagagccgagagttttggaggcgtgtgtaactgggatctgggtggaggaacctgacttttctcactatggttttcccatggataccaccagaggtgtaagatgccttcagagttgttctgcatgttaggtgggcatcctccgggacagtcctcagctgtgtgcccagaacagacatggtgacctgctgaatgcacttgacctggtgttcctgcccctcctacctttggggccctctggagccagctgcccctctgggcactgaagctgcttgctacaccgaacctggcttaaacggttctctggttatgtgatcttaggtgaggtatttagcttttatttcctcctgggtgacctcggcactgtttccttcctcactcatagggtggaatcatgtgatgatattggtgaagactcctgtgtacttagcctagcacccagcatatggacagtgctaggttgttgggttaaatctcccctgatcccacccatcttgtccttacttctggctgtatctgctttgccacagatgggaacaccccattcttgtgtaggaagcaaatctttcagcttagcaggaaagaaacatgtgatgtttctgccacccctagttgaatgctgtgcccatctcacaatagggcttgatttgggtcattctatcttcaaccacacacaatgggctcctctgactcttccaatcctcggggagaaagttaacaattctaattccaagagctctgggaagacccacccactcagcaggcattatttatttatgctttaatctttgtagattactccaagttgcttgatgctctccagaaagcccctgagtaaatggaagttgtgcatacacccaaagtaattaatgcactttctactagtgcgggaacatgtaatttgcaggaatgtgtgtcaagacccaccctgctaaatttataccctgtaatttgcaacgttcgctggcaccgaatctgtagagcggtgagcagtgagaggagcttacctgcttcgcaattatatctgctggctggtgttgcagggttgggtaactgggagagaggagatttcaatcacttaagtaaatgagaagtggctccctggggcccatctgagatggccctctggtcggaaggctggttaatcatgtttcctctgtgcagagttgagagctgctgaggacggaggaagggaagactagaaggcacgggtcctgagtgtaaagggaccttcggcttgagagaggtttgtacatcgtctccccctcagagagcctccaggaaagaaacacatggggctaatcgaacagaagtggtttaatggaatattttatgagctgcatctgccctcatcgctggctttggggagagtcctgttagtttttaagactggaagtcacatctgtagaccagtgagttctgtgatgtcctcgtaaactttcttggttggagaatcctgtgggagaatcattgccggctgaagttcagccttctggttctgcccagtgctgggagggagatgggagccaaggcatggcagttcctacctgaacgcccggtgttctggagactgaggcaagagggtctcaagttccaggctacacagggctacatagcaagaccttgtttcaaaacaaaaactgaaacaaaataaaacaaaacatatgcaggggtgggctggctggggttccccaacacaggaatccagcggaagacgatttgaggtttagttagccccagcgctgaagattctgtttcttctgaatgacattaggtactttactgaaccttgtgtctttccctcatgtgtggaatggaagtaatagtagctctgattggcctggttatgaaaatgaggtgttcgtaacggtgcctggcacccagaggacacacagtaaacggtccgttttcaggaatgccatttacatttggagaaggcaccatactcattaattacaaacatccctcggctacccaaaccagaagtggaatgggtaaacaagccaggaatcctgtactctttgaaaatccatttgaggctggaaaatgtggatttgattcacaccaggctgtgaatgagaggggcctgtaaaagtctccaccatctttacctcaggacttttctaagatgctgggggccttctctagggttggaaaatatagggaaggctatggaatctgggtcaggagagcctttctcccaggagatgatccgtaaatgatcctgttacgaatgtggcttttcacctttgtgtccgagtccatggacagctgagcttggggaagaaggttcttttctctgtgcattctgtgtggctgcatctcccactactaaatacttatgggctgatgatggcacctggggaagacctgtgtttaactgactgaatattaagaagcatgtttaagagaagcggtctttggcttttttacagcaatgaattcattcctgtttgctgctcttctgcaggaagctgtgcggtctgagggagcggggcagctctgtttccttatggcttttccagcttggactgggatttcctctgaggacttatttaggacaacagcaacaacaacaacaccaccaaaatacatgtttatagtggtgttgcctcagtggagattagagccttctcttgaaattttagttatgaaaataatatacactgtgtttctgtttgcttgaatcggatgtagtcttagcttcctttttttcttcagtgggtatactaccctccagatgctaccccacccccgccccgacacacacactgtggccaaggccctgcacacaactgggtttcttagcctggcttccttgtatgcaaaaaaaaaaaaaaaaaaggattttgtcctgttcacatgtccatgggctccccagctcccatccgaggctcctcccttttctttagagtttctagaggagttcatttctctgaaaaatttccttgtctgctgagatggaccaggcctttttgtctcattaagtcagatgcatctgggctatagtatggagacactggttgggagccacagacagggcttttagatgtcttcactgcaaatgcgcatcctcctacctggctggctgtttgcctgtctgcaaagaagacttaggaaaaacagcacaaacaaaaccaccggggtctgagttcacgtccgccagacaagcaggagcaagagcagcatagggggaaacgtgggcatggggcttgcgggcccaccaggctagctgcaccgtgtgccaagttcagggaggaattctgtcttaagagtaagatggcgagagagcaacctaggaagctgtcagaccctgtactacctctgcccttcacgtggatgtgtactggcaagcacgcatacacatggacggggtgggggtggggtggggatggggtggggaggagcgaccctgtgccaaaggcttatgttgaatggtattaaatgaaattaaactccttaggcatgaacgggcctgtccactatcccactgtcacccacctatgcctcatacattgggctggtgcagctgctatgcaaacactgttctataattgattttttaaaaagtttgagatgtttaatccatgaagaaaatgctatacacaggtcacttccccccttatccaagagttccacggtcatggattattatggtagcaaaaaacacaagggaaacatagtattcaagaagattattttctttgtcttaagacccaaccacttcttttctagaaatgcagactgcctatcagaatgtccccagctttgtgtatatagccgcttactaaaactcagttctaccctttgactcttccttgttttcttttgggctttaagagttccaaggcagctgctctgaaggtccagtactgtgctcagggccttgcaccttgcctgcactggagaggaaaggatgtctttcactatagtgttggcattcagttccacggatgctaaagtctgaagcccgaggtggtcccttgaactgccagtggcacttgggattgctcgccccttctgcgatgctgaagcgaagcagacagggcagcactagtctgagcagagcacagctaggagagtgggtctggtgccaagaatgccatctgctgtctcccaaaggcaaagattgatgacggttgtctctgccttcaataaatagagagactaaatatattcgtttattttaagtttgagcagcctttcataatatttcttgttagacaaggaatttatgttggggtgattaaagtctgattctcagatggatggctaacattttttagtagcttcccacccaattctatttcttcattgtgcttctgagtttgtctctctgtgggacaactgagctaatctacatgaggggttgcccatttggcatacccccgctccagagatggtgcacatttctcactgtgtataaggtaaggtccaaactccatcctctgacttgcaaaagcctttcccaggctgctggctctcatcaggaccattcagccatttgctgtcatgtctccacttacctcagtactttctctgcaataagaattcagttttacccaacctacaaagccaggcaggctgcaaactgttccatgaagcagtcagtgcgaggtcctctggagtaaatgtctccctccttagtgactccgctatttcttgtggttctcttttctgtgtcacttaggcctcccgacacttatgaacgcttgggactccactggtcaggtgtttcttgcgctttttcctgggttccctcctgggtaaccttttaggtttccagaaaaatcccttgcgaggggtggaggctaataagtgagttcattgaatgaatatgtattctaaaacacagtcagtgacttagagggtcacccaaggtggtccacatccgtgtgcttccggtagatccttgagtgtttcactggcatccttgtggtgtggtattgcagccgcagcctggctgcctagttgtggcacaagtacttgggcactagccacagttgtttttaattagaaaggtgtaatagcgccttttcgttaccactgcccttgaacatggtacttactattgattttaattagtcaacctagattgcgttcagtctttattctaaagctgttagaggctggcaacccttggtgatagatcttcacttcaggatgtgaacctctgaggatctggaaactaaaaaacaaaacaaaaactagattaaaaaaaaataggaagaatacaaaccctggtacttgcaggcaaaggatgggggaattcaggcaatgtttacgttctaatttttccactgccgttctgaagttacttgctagttttgaaaaatttaaaaaaccccagaaaatccattagacataaattatgtataaatcatcttacccaaatgattatgccagctctcattaaagagaaaaatattgttcttatttatttgcaggggaaattctgaagaatactattttctcggtgtttcccagttttcttattttgtccttacagtagtgagcctgattcacagtggaagtttggtgacagcaaagtgtaccctactccttcctaggaagcaggcctcgctcgctcgttaatggggacaccaggagatgtgcatggctggctcttcctgtgatgttttacaaaatctactccccttttccttctgctcagtagccgagggactgatggtggagcctgaatgcttaccccacaggttggagtagtctagtacagaggggtattgctggagaggtggccaaggtggggtgggggtggggcaccacgccttcattgaacacagttaaaaggcctgtactggtaccttctcccttaaggctctccccgtgtgctttgtggacctgagactgcagctggactgtgccctgggactctgggactggaggagtgtggtctgaggtgctttttccacccacaccttgcctcctccctgcgggaggaagctgagctttgagtggcctttccgtgtttactcacgtcgggatttttactggggtgggggaggtgggtggagattgagtggctcctggctgaagtttgaacagaggttgtttgttttgtgggaacacagaagctgatctgaaagggggaagggtagagacagagaaagggagagatggagagaagagagggagggctgtgtaccacagtctcctttatccacagaattactttctgttgcctacagtcaactgaagtctgagaaagtcacccagaaaattccagaagcaaacagctcctgagtctgaatggtagctgtcttttgagtaacgtgatgatatccatgctgccttagtaaatatcaacagtctaacagtctatagtagggggcgaagaaccttcctggaggcacagggtatttagggaagtgagacatgttttgggggaacagacgaattggttcgaggggaaaatgatagcctggacacacgggtggagtgagtagcagtctccctgggttgagacaatacctggggaaggacttcacaacaattgggaattttctaggcgattcagaaggtgctagaaagtccttctctgcgtgtgcccctgtgaggtgtgcccagttggaaatccgatgtagactattatgtctggtctcaaactgtagcagccagccttctgggctgtgtgtgtttgttgcacacagaacctcattatgaatccattgctggcctggaactttctatgttagactagcctggctttgatctcttagagatctgcccgcttctgctacccacaggctggatcaaaggcatgcgccacagcacgtctggattactggacatgctgctgtggtactgcggggtttggtacactctgtagtcacaactcttttccaggtattctggaatacatcccctagggtagggataggggcttctctgctgaataatgatgatacatcccttagggtaggataggggcttctctggaatacatccctagggtaggataggggcttctctggaatacatccctagggtaggataggggcttctctggaatacatccctagggtaggataggggcttctctggaatacatccctagggtaggataggggcttctctggaatacatccctagggtaggataggggcttctctggaatacatccctagggtaggataggggcttctctggaatacatccctagggtaggataggggcttctctggaatacatccctagggtaggataggggcttctctggaatacatccctagggtaggataggggcttctctggaatacatccctagggtaggataggggcttctctggaatacatccctagggtaggataggggcgtctctggaatacatccctagggtaggataggggcttctctggaatacatccctagggtaggataggggcttctctggaatacatccctagggtaggataggggcttctctgctgaataatgatgaatactgctaggcacccatactgctaggcacccattctctcttccatggttgttacgtcgtcaaggcaaatcattgatggcctctgtcatgcccaggagcagcaggggctgggaggaatgagtggtacctgtaggctgtcacaaggctctcttgcttgggcagccttcttcatctcctccctccctcctttgacacaggtgcctcggatctgcaagcctgcctgccctctgagctcaggctcctcctggagttgaagcttctgtccttgagcctctgggcagcagtgacagcttgacactgcctttttgaaggagttattgtgacaagagagaatgagcaaagccttattagacttctgactgggcctcgggcagaatcagggactgtttgcccagtctgtgggttcactgactataaaccgttccagactgcctttctctctgtgtagttctctataaaccttgctttttatttttctttttggtgtgtgtttgccaaagacaacaacaacaaaaatctttatgtaacagaaggagaacttccaaatttaccccatggaaaagttcagtgtagcccatataagatttagaatagccaagcatcaccccaagagggcttgaggcctgagcttggttgtaacttgagatggcgctcacctctaagagtggcatccacatctgtgccttgggttcatttggaatgagatggaacacacccacccttgacctttctgaatgtcctctgtagtttggttcagcttgcttcagtggacctggggccttgggccaggcttgagacgtcggcatgcttggggtttatcagggtgtggctgatgccattttggtgttcagagtcagcctgctttgagtgttaggaaaaatgagcgaatcgattaaaaataaatcctgaacatgccattcctctcgacaagctgcccgttcccaccggatccacacatcatgagctgtggcatgtgacatggtgtgacttggactgtgtggactgatagtggctcaggctgtagatgtaaggaaggaggctgtcaactgggagtgacggagaccttgtctgagagtcagctgtaccagtcaaacaatgtgtgcctttatttatttattttctcaagtaaatattgttttagaaacttggcctgcattggctgtccggagtggtcaaatgcagatctctgtacattttcaagaagtaaacacgtcttggggccaggtccagatcaagaactagagcacccaacaccgtaacacctcagggagccccacaccatgcttacacccaccactgtcccaacttccaacaccacagataaattttctctctgctgctgaatgggcaagaatacctcttttcattccatgttagaaggctctcatttccatccccatttccagaaggccaattgtgggatgaccctccacccacttgggtttcgaggacaacccatcttggcaagcacacacctcagcagccttgggctccaggctctggcatccttgctccaggcgcccttgaatgagctcttctgtcttccagcaggaatcatggcccgaggccacctggaagacccagtgccctggaaacaggagtccagagcaggctataattgtgggcttacagggagtgccaggaaggcttggagagacgttctgcattccccacgcaggacagattaaatttatacgctttaataagactcactgttctgtgttcccatctcactgtcccacctcggctaagtcttacctcaggcaccaaggggtgaggctcttgttaggggtggagctggcaagagggtggggcacctgaggccaagggggagttcatgagctctccctttcatagctgactaaggaagagccatccatagcctccacccagtgagtccctgctgcgttccctttgtagcttaagtcaatattgggattgggagttctatagctatggcaaataccttttcttccaacttcctgagtttctcagattttaagaattgttgttttttttttttaattttttgtaatttaataaattgggtgaccctttccttttgacttttgtttcttgacatccctgtacccagctttggtatgaaccatgctgtttggcctccccttgatcatcttggatgctcttctttgtcctccagatctattccctatgttgacatgttaaggaatcacttttgaaaactggatgcagtggaggatctgcgcacatcctgagggccctccaggacttctccacagtcattgttctagaccttgatgattttagtgtcagtcaagctacatttgtgttaaaacacattgttctaccaggcagagactaccagactgggcctgtgcgcaacgtattgtctggtaaattgctttctcccctctgaccatattatagacattgtcccaagttgctgtgtccaggcttccaggtccttctaaagtctgctccatgttaggaatgctttgtgattggctgccaccacccttgtcttggtaaagaaacaagttttgatgctgtgaggaagaaggaagcgaacaccatcttctgtgtgcttctgtctgcccaaatgtttccccagggagagatgtctaggtgtggaaggggagggagaaggactgggtggatgccattggatcctattcccttgtcttgtggcccaggcagcttggccagtcagtcagccctattcccaccagtggtgtgccaaaaccagtttcctcacacccatgtcaatccctgttacatagatcattactttgtttaaagagtgacagctttatatggctctgtttaactgtatgtgagactgtggctctttgtcctcccccgcctcaccttgcccatgtgagtgcgtagtacgtgcgtgtgcatacacatgcaagcagaggcccaaggttgatgtcaggaattatcctccagtgctcctccttcttgtattgaagttgaatccctcactaaaacacaggactcacagttacggcaagtcttgcaagccagcttgctccagagagtcccctatctctgctttctgaggtgggaattgcaggaaggccacatgttcacctggcgctttcttaggttctgggatccagactctgtcctaacactttcccggccagcacactaacactgagcaaccctccccaggcctcagccttttcgtttgctatcagtcgtctcccatcagtaccttggtcattcattcccatcactcatgttcttctggttcgtttgcagtttgcttactgtgtttttttttttttttttttaaatgcctttgaaaaaaaaatgttggcattcctgccttgaaaagttctataaaagatcaagttgcccttctttctggcactagttgaaggctttggttttctgctttgtttttatttaattaggtgaaaattttcctttttggctgcagcgtcctggctgtctgtaaatgcattatcagcttgcagcacggagtggactgtgatgtgaggtggatagtgagctgtgccaggctgcggctggagcccgctggagccgattaccgagagggagcagtgagacccaatcccttaaaaaccgtggccctccacgtggttagttagcatcaaggcacactgactcaacgaggggtttagggagaagtgttcggactgcacgcggctctgcgtcagtgtgcgtcctgattctcttggctttcttcatgtcatcctgttcccttaactctcgtggcaagtttccttgtcacgtccaggagcatgtgaagagttcccaccgtccatactggtgtccatactggtaaatggcctaagctccttcccagctaagtggatgcagggctgaacaaaactgggctagttgggaacccagtcccaacactgctatagcagtggatgacaaaggccagctcctgatttcatacttcatttctgccagaccgccctcatcacctccagtagcaaaggcttgctgttttgctctccatgagagtcccagccccaaatgccactggtctgcagctgtcactactccctagatacagagagaaacaaataccggccaagggtagggtgctgatggtcggggatttcccatggggacagggtattggcctctctatggatgggcctgcagacttagccgagggactgtcatgatccaaggctcatggaaacacagggctcactctcagggttgtgtcattggttggacatgtgtgggcctggcttgtcttcccagcacaggagctgaccttgacttctgtgagctggctttgtgaggatgggcgttcaccgaagggtgaatttgctctggatagccgtgtctggtaatactgacagctcacatcactctgaatgcctttgtgccaggagctctggagacaagctctcacctgctaactttgggccgcctctgatctttgactttgagccttgaagtttgcacttaagctgatctagaggtagagcctgttttgtagaaaatctcaggatccatgaacttctcaggagatagattaataatatgaatttttttcttagtaatcaagttcgaatcaagttattacaatattcaagcatgaaggactttttttttaattttgaattccataaatcttaaactacatacaaatgtggaactcggcctcaccttagggaataatccacaagatgtttgatggcatgctttttataatatagtacaaggaagcaactggcagtatttccatccacccactctcacattcatccgtccctctcccccatccccaactcctttaaactttctctctgagcccagagttacattaggacacaggcctttctgttgtatagaggctgctcatggtgctgagggggcagctgaacagcagccgtttacggagcactatggtatgcgaagccacagatgctcgcacacgctgggaggactgggtgggtatgcaaactggcctgggagaccagggagggagtctttggaaaggtgcgatacctgcaacacacaaggaggtcctgcactgaccccagagtctcccagccttaccctttaggggatggaaactgtgggactgttgcaaacactggatgaagtggtgaggtttgtcctagggttcagattagaacaggctaagacatgccggggaggtttgccagtaatgagggaaaaatctgttctagggttgtgggaggcacggttagagaggaaggacgtagaaagaccatgtgctgacccaacagcgctggatggcaggaggagcaagcttagagagaactagggttctgttttagatatggtcaacagatgctgcaaaggaaatctgtttggtgccaagggatgaaactgtgaaacttgggtactggatggatttgtcaggagaacagcttagctaggcactgaggtaccacaagttggggttttgccttggaggtcaaacccaataagagaacaaagtggcttattcatggaagccatctgttgattttgctaaaggaagcagaaccccgagactgttgaagggtgggtggaggaagctgcttccaagagtgtatgaggtcttcgggggaactggaggtataccgggggtgggtgggtggaaccgtagaaggaaagactgatccaggtggcccagtgtagcagaactttgcacatagaccaggcaggcattgtggctcacatctgtaatccctgcattcttgatgagaggcaggaggattgaattttgaagccatcttgggccatgtgttgagacttggcctcaagagtaataaagtaaccgttagattcggtcactgggagtctagttggggaccccgtgaggatggttgagggtcagaaccagctaatgctggggactggagagacagagacagggatgtgtacggtggcattctttttggaggtgactcatgttctcagtgttcaccaagccttttgacttcctgccagtgccttcattctgagctgtccccattagcagagatcaatgcagtagccagagaccaggagctacacagtggggcatgctattgaatttattgaaaatcatttcttaatgaacagctcgcttctcccgctttctcatctcacctaaaacgattctattgtgttcagtgtggggtgaatccttgtgcagttcagatcacccgtcttctaattactaatcatgtagctacattatagtggtatgccttgggaaatgacatattatgtatctacatgacacctagtttttatagaatagtaactctttaatagggaataataatacctttaagaagtgagccgtggttaatcttatgacctctgtctgtgtgttgtcataaaatggatgaaaacttggaagtttccattgacttttttcctttattacttgtggagcttgttagcttcaagttttggtctgtttcccttttgtaaatgggtaaactgagacatggtgtcaaagctgttccttgcgattggatgcagtggtactggtgtttagggcttgtgggctattgtgtgtctaggatgtaaaaaaactctgtagtcttagtcttctttcctttggtccctccctccctccttccctccctccctccttccctccctccctttctccctccctccttccctcccttcctcccttttaagataacagttccctatggaatccaggctggtctctagctcaagttctgcaggggttacaggcatgcccatagtcagtcctccttaattttaaactttgttttcagggtggtcataatccacctttcaaggtctgaaaagcccaaacaggttcctctcagggtttctgctccctgactcatcaggtctgacatgtctctcgaacaggtaaattgctctgagagctgcagtccttgaggactcccacagtaagtactgcttagccctcctgctctcagaatgtcccaacagcattcgctcagttaattcctcatgatggagggcctgttgtcagctcagtgggaagggagggtgcctcgtgagcagactgtagaagcaagatggactggtttaatggattaagctacttaagaatatttaagaagacacattggttaataggcattctaccctcgcttagtggtagcagggtggcttttttttccctccccctggcagagttcctctcctaataggaagtgataaggcaaacaattgttcatttactgagacttgatggaaggtggtgggtaagtcatgggaaatggagaggcccttggacccgtatggaatgggaggcaggtctgacccttggctctctggataggttgtctctggatgcagggctacaaaggatctgtcatctcttgacaacagaggctaggactaggtcttcccagtagccaggaacctggtgttttgggccagctttggcctgcatttcaacaagctggttctcagttgctcagtgttagataggaggaaggacccagaaattacttttaaatgctaaataatacatctggagtaggggaatggtgtgcattagcccagtgttgggtacatatccacaaaaacaaagaggggatgcgttaagggtagaaaatgactcagacatggtctaccagtgcctgctttatacatgggcagctcgggcttagcatggaggaacaattgcagactctttggaacaacggccatgttttagtctggctcaagattgctgggaatgttttacctctgcataacaaggccagcagacgtttagctcccagagagtctcctgtctctgcctcccatcttgttgtgggaacactgaaattacagatgcctattatatgagttcttaaaagttgaactctgggcctcccgtcttcactgtaagctctttgcctatggagccatctcccgagccagagggctcttgattccctaggaaattcctgagcgtctagagggaaggagctaagtgacattgggtcagatagccccaattccagcaggcatttcctgtgggggctgttccccttttagagggcatggatcagaaaggggcacagccttctctaaccactgcagaagtaccagagctctggggagaggcggtgagaatggatggcaggaaagaagaagtaacgaacatgacaccgctgttgtgcatttatcaccagcttctgttctgtttccccatcagcaacacggccagagaggtggatcactgagcctcagagagggtgacctacttgtctgaactcacagagctctctatacttatcagagacgtagacctttgaacttgtgttgacccttattctggtgagtcccctcagtagaaagggcagcaggagggcaaggggtgaaggctggcttctctttgccgcccctcctcctgggccacctcttctgtgctccacagtggccaaagctttggagctccacttagcagagggtagtttctgttgccccactccctttgagcctttctcagctgagctgagggatggggaggcaaaggggtttgagaaagaccgtgttgacctccttcagaagccagccttagttatttttgcttttggaatgccatggcttaatatgtggctgggtaaatctgtctggtgggatacactttgctttccccccaggattggcttttaccccacaactgttgctgcctttcagaaaatgaaaagaattcataacagagcaaagctccgagatgggcgtcctcccatttgtgctgtcccctccacggtgacacttgtccccctcatcttgcattcctttccagttgaggggatttgaagttgagagtatcatcctcattgatacaatttatcttgtgtaggtttcctcaaatgttagtgtagctttcatttttttaataattaattttattcatgaaatgtttttaaagcacacagaaagttaccaagaaaaatgcctagcaatccattcgctcaccccctgcttcccctgggttctggtgcttgtccacctgtgcccacctgtgcccctgaccctgcctgccagaggtgaccatgaccttgaccagggtagtcatccttcacacccatgtccccttaaagtgctactttctgagttagtatgggcgatgttctgcaatttgctttcttacttcctgttaagtttctcagatttatccatgcaaattcacttcaccccagttcattccacgaaagccctggatgcttgtgcactgtgggaaaagattgtgcttctctctgttctccctctggtgaacatgtggtggtggtggtggtggtggtggtggtgtgtgtatgtgtgtgtgtgtgtgtgtgtgtgtgtgtgtgtgagagagagagagagagagagagagagcagagcttgagcaggcacaactcttggagtagactatgcccttccccttcagtgtaatccaagnnnnnnnnnnnnnnnnnnnnnnnnnnnnnnnnnnnnnnnnnnnnnnnnnnnnnnnnnnnnnnnnnnnnnnnnnnnnnnnnnnnnnnnnnnnnnnnnnnnnnnnnnnnnnnnnnnnnnnnnnnnnnnnnnnnnnnnnnnnnnnnnnnnnnnnnnnnnnnnnnnnnnnnnnnnnnnnntcttctgtgtttctgctgttctgcctatgcgagcgtccagccacgtctgttcttgggaacgaccacagctggattttagcccttttatttatttatttttaaatgtagtttcaagggattggactcaggtcatcagagttataggatagtttttttttcctccctgaactcattagctatcttgatagctccagttttgtgcctcttgtgtcaccctgtatcctgtgcatcattttctgcagtctagggggttcatcttggaccttccgagttgctaccaggcgttcttcagagtcccaatgcctgtgccatgcctggggtcctggtgttccacttcttgccactccagaatgccaggctctagatttttgcaagcctgatggttgtggatgggagcttccttgttagtcacttggtgattacaataacttagcatcccttcctcagtaggaacacctactgtggatgctttgtccagccctgcccccgcccctccccgggccacagcatcctttgtgttctcacatgcagttttgcaagaaaattctacatatccccactttgtatctttcccagtggatggggtgtctgaaccatgtttatagaatttacccaatgacctggaacttcacattttaatgcagttgtattcaactgccttttcctttctggcctgtgcttgttttgagtcttagttgagaaatccttcatcatcaagatgtgctttggggccagaatgaaggtcattttgcttttctggctcattccctggctggcattgttatgttacagctttgcctgcagtttgggagggtgcagggggagggggagggggagcagatggtctgttgtggaatggatcacagagactgtggaggtggctgccctgatctctgggtgcatggggataaactaggggctgaaatacagcccttcctcttgacctccgcctgcttctgtgccggagggaagagatgattagctttatcataagcctcgcttatcaccagcctgatgcagttggtcagaaaactgccccctctcctgaccttcagctcagcttcactgacccctacttctgttgctgctgctgcaagctgcctaaggaaaaggtttggggtggggcacattgtactttggggtggggctcattgcactgggctcttgcagcaccctctgtgcagcccacctggtgaggacttgggtaagccagagaaagagaacaataggaaatgggttcaagctattcactctgtgcctctctccctgggaatttagaaaagcttccttctgcaggtcccgtcagtcattgatccactgtatgacatatggcaaagcaaaattgaagttcaaggcaggtcagatgaatttatgtcagaactggaaataaatgtctgtaggagtcagcaggttcttctgtccccatactgcggtcagcagccatttgtgggtgtctatggatgcctggcacttgattgttgctacagacacagggcagcagaagagacgagattctctggggccagggaaccgttaggtaaatagcagtctctttctcgtgaggtgagtgtggtggggtggacagatggcacagttgtaggttgataagtggttgtacgtgcccattacctgtcgtctgatgcttcctgatctacaggcttcaatccttagaaagatgcaaagggcagacaattataagcgttgacttttgcttacacaagaagttcattaccccctaccccactcctctctgtggtagacctggaatacagaaagttactcttaatgattttgaagatttaaaaaatgtatcagtgaaagatgtatgagatactattctcttttttagataggtacctatccaataacttagcctagattcctggccagcaagactgaagtattaactatctgactctttctagctgtgtgaccttgggtgagtcttgtcttcagtctgctccttcatctataaaatgggcaggggattcttctaagaacttaaaagaaaaaagggagggggctattaaagtcctgccacatccaagtgctttggtagacagtagatcttccgcagaggaaggcctgtagtacttggcgtctcaggggctgttcacagagccagaggaaggacaaagcaaggctctggtgtggcacagggttcaacttgtggatcatatcaagaggagctgcagggcctctggagggtggacatgagaccttatcccagtggctcagtagctccccgaaacaggaacaccattcccacataattttcctcatgaagtgatgcaaggacgtgaaagcatatgtaagattataagcagaagcttcagcccaagaggacagaggtccaaaggagaataacttagagagctgactccttagggaaactgtgagttcctgcacctcctcctgtgaccttcccttgcttcctgaatgctggccactggccttcttccctcacttgttttataagaaggaaacaaaacatctgccatcttggagcacttcctgggagaaacaagccatgagccgtgtgatgggcagatgctaggcagacgctagctgagctccatcactagcctagcgtccttctccatccttaactctcgctcagggaaacaccatgtgactaacataggattttctttcaggatcagggatcatgtttttgttatatctgtggctataaaagtcagctgaagtgtggggttatgttacactttctcagcaatatatcagggtgatcctcctccatcagatgggtaaacggaggtagcactagtggaatgagctcctggggcagagggagtatagattaacaaggccgtgggcggggaggggggctggctaagcacaggtgcttggagctaggccagaccagacatccttgtgtgactgctgccttctcggtgacagccagatgctcccctatccaagcttgaacaggaagatatttgcatgatgaggaccaaatggcttttggaaaaatacacaggacagatgtccgaggttctgtgtagcgctcacatcacacgggaacagtccagagcacaaaggctcttcagacatgttctaggtatgcttataaacaaatcactgaagaagagctcactaggtggtgttaacctgtcggtgagtgaatgtatatgtccatgcaggtgtgtctgcatgtctcaagaaatgagtcctggagaaaagcacgaaaaggtagtagggaaggaaggtctctctgagatctgcaagcatgaatgctaagctgtgtgtgtgctgcgcagacgagttgtgcctcttgttccgttcagcggtgcccacagatctaggctgtcgggaagagaaggaggagaatcgaagggagcaatcggaaagcagagtctactgatagtttgcagatgtccattcagacccgaccatgacgaccatgacggctgctgctagggagggagccgcagcggagagcaaggagaagtgccaaaggacagcagctgtcaggatgaaattcccatttctcagctggaaacgtttgtgtcactggctgaatgtcctgggtgactgcagtgagcatagcctgctggagtttctagttgttccggttctgttccccacatcaaataagagttgcgggccaggggccctggaagacgctttagcaacaggctgctgtcttctgcccgacaaggaagggcgtggcttttacttttccattcgtgcacagatggtgcagttattttcagttaagtgatgttctgcaggggaaacatgcaactcctttggatcctttgacttagtgaaaaagagagaggagaggaggaggaagccaactttgtgctaaggctggtcatgtttttatttaagtatattccgagacaccgaactgggagaaatattgctgccattagaatgcccagctgttgggttgaaagatttctaacctttcaagcacacaggatagcgatctacctgttcaggtttaggttctctgtattccttagtttaactatgtatgcacagtcccacacaagtgctagagaaatggggtaagggtgatggggtggttcagggatggaggttaaggtactaatgccatgcctggtttacttcttagagttgtcagtgatacttacgggagagctgggaattgtagatgcctggggtgcagagctgaggacagacagagcctgtgcctctgggtgtggtgtgtgtgtatgtgtgtgtgtggtgtgtttgtgtgtgtgtgtggtgtatgcatgtggtatgtatgtgtgtggtgtgcgtgtgtgtgtgtgtnnnnnnnnnnnnnnnnnnnnnnnnnnnnnnnnnnnnnnnnnnnnnnnnnnnnnnnnnnnnnnnnnnnnnnnnnnnnnnnnnnnnnnnnnnnnnnnnnnnnnnnnnnnnnnnnnnnnnnnnnnnnnnnnnnnnnnnnnnnnnnnnnnnnnnnnnnnnnnnnnnnnnnnnnnnnnnnnnnnnnnnnnnnnnnnnnnnnnnnnnnnnnnnnnnnnnnnnnnnnnnnnnnnnnnnnnnnnnnnnnnnnnnnnnnnnnnnnnnnnnnnnnnnnnnnnnnnnnnnnnnnnnnnnnnnnnnnnnnnnnnnnnnnnnnnnnnnnnnnnnnnnnnnnnnnnnnnnnnnnnnnnnnnnnnnnnnnnnnnnnnnnnnnnnnnnnnnnnnnnnnnnnnnnnnnnnnnnnnnnnnnnnnnnnnnnnnnnnnnnnnnnnnnnnnnnnnnnnnnnnnnnnnnnnnnnnnnnnnnnnnnnnnnnnnnnnnnnnnnnnnnnnnnnnnnnnnnnnnnnnnnnnnnnnnnnnnnnnnnnnnnnnnnnnnnnnnnnnnnnnnnnnnnnnnnnnnnnnnnnnnnnnnnnnnnnnnnnnnnnnnnnnnnnnnnnnnnnnnnnnnnnnnnnnnnnnnnnnnnnnnnnnnnnnnnnnnnnnnnnnnnnnnnnnnnnnnnnnnnnnnnnnnnnnnnnnnnnnnnnnnnnnnnnnnnnnnnnnnnnnnnnnnnnnnnnnnnnnnnnnnnnnnnnnnnnnnnnnnnnnnnnnnnnnnnnnnnnnnnnnnnnnnnnnnnnnnnnnnnnnnnnnnnnnnnnnnnnnnnnnnnnnnnnnnnnnnnnnnnnnnnnnnnnnnnnnnnnnnnnnnnnnnnnnnnnnnnnnnnnnnnnnnnnnnnnnnnnnnnnnnnnnnnnaataagcagaaggaggagagcgtattggattagatttccagtacaatagtgtggcttgaacgtcagattgtttgtctcatcagagagatctgagatcaagctgtcagctgggttggttcctttcagcccccatcccctgatttactaatggctccttgtgtcttcatgttgtttctcctgtgtgtgtgtgtgtgtgtgtgtgtgtgtgtgtgtgtgtgtgtgtgtgtctgccctaattttcttttccagtgaggataccagtcatgttgaattagggtctactctaatgcctcattttaatgtattacctctctaaagacaaatgtgctcccattacgagattactaacaggcctacagcttaaagctttggagggatccaatgcagccccaaacaccagggagaagatgggctgaagactctgctgggtcagcctgccccgtgcttagaagcctggggaacaggaatgacattcgtgtgatcaagacactggttttaaaggagggaggtgctggggcttcagagtcagggtcatgcctctgaagagaggctctctacaccaggatgtaagaattcagagttgctgaaggtcctagagataccgtcacctgcactgaaaacgctcactgtgtgaaaagagaaacaacaggagcgactgagaactgctgagtagcaggtgtttctctgcctcagcactgttgacttgtcaagccagatggctctgtggtgtggtgtgtctcagtgggtggcagattaggagaaatgtggcacaatacatcgaaaagtcagagctgcactcctccctcccccgaaacccttccatgcaaagtcgtatcacatccctgacctttacatgttaaatggcagtagcacccctagtcaatgcaagaaaatgtctctaggccctgacttttatatatattcccacacagttcttcactgtgtagactgctggttgaaaagggaactagagataacccatggaagccactaggccagagaggcagctgggctgggcttgaggagggttagaaagacagagtctacagggggatcttctcttgctttggcttcttcttaggcgcttacatttgatgacgtcactttgctaaggcactgggtggggtgcgccttgtgtgcttaaggggacttagaagagcacagagcatgtgcctattgtagtactggcagggcatttgtgtgtaatgcatataaaggatgggataaatagtctctgaacctacacaatcactcatcaagtccatatgttgccagccttattgatgctctgagcaaagtctttggaatctaatctgaccaattttctggttccagaaatctgtttatcagagcaagatttcacagttgtagtgacttttccagggggtttgtcttcgaggagttagctctacaaaagagagtctaagtgatttccaaacaaacccaagcgacagccctgcattctgcagcccggaggaatttcctgctggctggtgactctctgagcagttgttctcgaacagctggagtgtgtatagggggtagagggcaggggtgtggaggttctgggctgagcacgtagtgtctggctagaatccagcatatgactgctgtctggatacctctccatggacgtgcagatcataaagttagtgctcactctgagggttagtgacttgtggggttgccttcaggggaggtcctctgttgagtctgtgctcaacagaatggagcatcctcattgattgggtggaagggtgggagaaatggtagctcagtgggtttgcagctcctgcaggtcagagtggcacatcctctatttctggtccttctgggctgtgcctccccacatcaggtccttgacactgttcccttgatctacagtcctttgctttgtgtcagtctccactgaaaatgccacttctttttttggactcttcttggttgcattgaattgtaaagaagaaacannnnnnnnnnnnnnnnnnnnnnnnnnnnnnnnnnnnnnnnnnnnnnnnnnnnnnnnnnnnnnnnnnnnnnnnnnnnnnnnnnnnnnnnnnnnnnnnnnnnnnnnnnnnnnnnnnnnnnnnnnnnnnnnnnnnnnnnnnnnnnnnnnnnnnnnnnnnnnnnnnnnnnnnnnnnnnnnnnnnnnnnnnnnnnnnnnnnnnnnnnnnnnnnnnnnnnnnnnnnnnnnnnnnnnnnnnnnnnnnnnnnnnnnnnnnnnnnnnnnnnnnnnnnnnnnnnnnnnnnnnnnnnnnnnnnnnnnnnnnnnnnnnnnnnnnnnnnnnnnnnnnnnnnnnnnnnnnnnnnnnnnnnnnnnnnnnnnnnnnnnnnnnnnnnnnnnnnnnnnnnnnnnnnnnnnnnnnnnnnnnnnnnnnnnnnnnnnnnnnnnnnnnnnnnnnnnnnnnnnnnnnnnnnnnnnnnnnnnnnnnnnnnnnnnnnnnnnnnnnnnnnnnnnnnnnnnnnnnnnnnnnnnnnnnnnnnnnnnnnnnnnnnnnnnnnnnnnnnnnnnnnnnnnnnnnnnnnnnnnnnnnnnnnnnnnnnnnnnnnnnnnnnnnnnnnnnnnnnnnnnnnnnnnnnnnnnnnnnnnnnnnnnnnnnnnnnnnnnnnnnnnnnnnnnnnnnnnnnnnnnnnnnnnnnnnnnnnnnnnnnnnnnnnnnnnnnnnnnnnnnnnnnnnnnnnnnnnnnnnnnnnnnnnnnnnnnnnnnnnnnnnnnnnnnnnnnnnnnnnnnnnnnnnnnnnnnnnnnnnnnnnnnnnnnnnnnnnnnnnnnnnnnnnnnnnnnnnnnnnnnnnnnnnnnnnnnnnnnnnnnnnnnnnnnnnnnnnnnnnnnnnnnnnnnnnnnnnnnnnnnnnnnnnnnnnnnnnnnnnnnnnnnnnnnnnnnnnnnnnnnnnnnnnnnnnnnnnnnnnnnnnnnnnnnnnnnnnnnnnnnnnnnnnnnnnnnnnnnnnnnnnnnnnnnnnnnnnnnnnnnnnnnnnnnnnnnnnnnnnnnnnnnnnnnnnnnnnnnnnnnnnnnnnnnnnnnnnnnnnnnnnnnnnnnnnnnnnnnnnnnnnnnnnnnnnnnnnnnnnnnnnnnnnnnnnnnnnnnnnnnnnnnnnnnnnnnnnnnnnnnnnnnnnnnnnnnnnnnnnnnnnnnnnnnnnnnnnnnnnnnnnnnnnnnnnnnnnnnnnnnnnnnnnnnnnnnnnnnnnnnnnnnnnnnnnnnnnnnnnnnnnnnnnnnnnnnnnnnnnnnnnnnnnnnnnnnnnnnnnnnnnnnnnnnnnnnnnnnnnnnnnnnnnnnnnnnnnnnnnnnnnnnnnnnnnnnnnnnnnnnnnnnnnnnnnnnnnnnnnnnnnnnnnnnnnnnnnnnnnnnnnnnnnnnnnnnnnnnnnnnnnnnnnnnnnnnnnnnnnnnnnnnnnnnnnnnnnnnnnnnnnnnnnnnnnnnnnnnnnnnnnnnnnnnnnnnnnnnnnnnnnnnnnnnnnnnnnnnnnnnnnnnnnnnnnnnnnnnnnnnnnnnnnnnnnnnnnnnnnnnnnnnnnnnnnnnnnnnnnnnnnnnnnnnnnnnnnnnnnnnnnnnnnnnnnnnnnnnnnnnnnnnnnnnnnnnnnnnnnnnnnnnnnnnnnnnnnnnnnnnnnnnnnnnnnnnnnnnnnnnnnnnnnnnnnnnnnnnnnnnnnnnnnnnnnnnnnnnnnnnnnnnnnnnnnnnnnnnnnnnnnnnnnnnnnnnnnnnnnnnnnnnnnnnnnnnnnnnnnnnnnnnnnnnnnnnnnnnnnnnnnnnnnnnnnnnnnnnnnnnnnnnnnnnnnnnnnnnnnnnnnnnnnnnnnnnnnnnnnnnnnnnnnnnnnnnnnnnnnnnnnnnnnnnnnnnnnnnnnnnnnnnnnnnnnnnnnnnnnnnnnnnnnnnnnnnnnnnnnnnnnnnnnnnnnnnnnnnnnnnnnnnnnnnnnnnnnnnnnnnnnnnnnnnnnnnnnnnnnnnnnnnnnnnnnnnnnnnnnnnnnnnnnnnnnnnnnnnnnnnnnnnnnnnnnnnnnnnnnnnnnnnnnnnnnnnnnnnnnnnnnnnnnnnnnnnnnnnnnnnnnnnnnnnnnnnnnnnnnnnnnnnnnnnnnnnnnnnnnnaacaacttcaccaacgagtgcaacatccccaggtaacttcatgtgcagcaacgggcggtgcatcccgggcgcctggcagtgtgacgggctgcctgactgcttcgacaagagtgacgagaaggaatgccgtgagtggctgcccgtggtggtgggcggggttggataagggtggaattccaggccaagaacaggagtctggcttggaccttgctccctgtttgctatgagctactgggccagcttcccctctctctgggtgcagtgtggaccgtgcagaagtgtagtatggtagaggagcccatgcttggatgagtagaagtgactcccattaagccctacggatgcctttcctggatgctactctcacctttagaatcccaggcattacattatatggtgcctttcagtcagcaaggaccgtgtctgctgccttggtccagggctggaggcttacatgtgactgtgtggtagagttctcctgatgattctgtgagacttagtattatataggagtggatatgtccctatgctgcacagtgagcacagtgagcttggctctaggtcacctccctggcatcctggtaggtcggcaacattgggaggcatggccctggcttgttagatgagcaactgctacggaaccacacatctcagctctgtcataggcttcggcagccaggccaggtggcatttctgttgggaggactctcagttctggctctcagttagctgtggctccgggaggcagctgagggcaagatactgaagggtaggaacttgaacttttgtcggaaccgttttttgggtttgggttctgtctgagggagcactgggtttggagccacctacagcagctagagacttcctccctagtgctctggaagagtgtttcccattctgaggctgacctctcacctgcatgggatgcggcacccccatgcctacttctgctcttgagagaaggtttggggaggagaaactggggagacttggaggctgtgttaaattttgttctgtgtggtttttctcattaacttgttagacctcattttttttattattattattttcccttaccttttttttgtgtgtgtgttaggaccctgttactgtgtccttgcttctagcataactttaaaacttctagacatgctaacattttaaaattgagtttcaagtgtgatgnnnnnnnnnnnnnnnnnnnncacagttgtagtgacttttccagggggtttgtcttccagagttagctctacaaaagagagtctaagtgatttccaaacaaacccaagcgacagccctgcattctgcagcccggaggaatttcctgctggctggtgactctctgagcagttgttctcgaacagctggagtgtgtatagggggtgaagggcaggggtgtggaggttctgggctgagcacgtagtgtctggctagaatccagcatatgactgctgtctggatacctctccatggacgtgcagatcataaagttagtgctcactgtgagggttagtgacttgtggggttgccttcaggggaagtcctctgttgagtctgtgctcaacagaatggagcatcctcattgattgggtggaagggtgggagaaatggtagctcagtgggtttgcagctcctgcaggtcagagtggcacatcctctatttctgatccttctgggctgtgcctccccacatcaggtccttgacactgttctcttgatctgcactcctttgctttgtgtcagtctccactgaaaatgtcacttcttttttttggactctttcttggttgcattgaattgtaaataagaaacaccagggagtccgacagtgttggtgtgtgagcctgtgtgagtgtttgtattctgggtctatgtaagcgcatgagtatatgtgtgtttgtttgtgtgtgtgtgtatttctagtctatttgcatgtgtgttcataaatgtctgagtgaaggccaaagccaaggacactcattgctgatgcttctcaagttctgtgcatttggtttttgggacagggtttctcactggcctggaacttgccaagtaggcttggttggcttgtcaggatctaccttagaatcatgtgccagtcactgccaagatatatatatatatgagtgattctggggatcaaattcaggcccttatggaaaatatgttaccaaccgagccagctccccattccctggctttttaaggtaagaaaatgccatggttaggaagattcttcgggccagaggacagattaagacttggaggaatcaactgggaggcaggaggctgggttggaagttgtagctagtggtgatccccatggggtggtggctgcttgcactcctagctgcagtgatagggatagggattggccgtgtgcagggctgataaagtgagccagggataaggcttgtgatggctcgggctgagtggaagcttttgttgtagcttccctttggaatggactgtgaaatctcatttctaaaaggcaacatgtctgtttggtcctaactgagtatcaggtagcagatgttctccaaggggctatccacagcacaagggcttgtttggaacggttaacccatggccatggccatttccactggtcctggcttgcttgctccagttataaaagtattttttttatatcacttcaaaagtagttttgccactgggtgatggtggtgcacatctttaatcccagcacttgggaggcagaggcaggtggaacttcaggttcaaggacaannnnnnnnnnnnnnnnnnnnctccccattcactggctttttaaggtaagaaaatgccatggttaagaagattcttcgggccagaggacagattaagactcggaggaatcaactgggaggcaggaggctgggttggaacttgtagctagtggtgatccccatggggtggtggctgcttgcactcctagctgcagtgatagggatagggattggccgtgtgcagggctgataaagtgagccagggataaggcttgtgatggctcgggctgagtggaagcttttgttgtagcttccctttggaatggactgtgaaatctcatttctaaaaggcaacatgtctgtttggtcctaactgagtatcaggtaacagatgttctccaagggactatccacagcacaagggcttgtttggaacggttaacccatggccatggccatttccactggtcctggcttgcttgctccagttataaaagtatttttttttatatcacttcaaaagtagttttgccactgggtgatggtggtgcacatctttaatcccagcacttgggaggcagaggcaggtggaacttcaggttcaaggacaacctggcctacttagtgagttccagatcagccagggctagaccctgtctctaaaaacaaaagcaaacaaacaccagccagccagccagccagccagccaaccaaccaaccaaccaaccaaccaaaaaccccacgcttctctgtgcatggaaaagctgggcaacattccgcagagggaaggcaacagaggagtctgatgctagcaggtcaacagcaatttaattcaaatttaataggtgatccagagccatgaagggtattctagacaatagatagatagatagatagatagatagatagatagatagatagatagatagataaatagatagatagatgccaagccaagcactgtgaggaatgtatggagggataggagcactaatctggagctatttcctttggcagagcttgtgaaagatcttgagtcctgctagcttgttagccctaggcagttccagaaggccgtgctctatcaccacgggtgtcagcaaagcatctatgtctgtttccagccctggaggaggaagcccaagctttgtcttttcttcatagctcaagtgtctggtcagaaatgcccaataaatgtttgctgagtggctcaaggggggtcagagacgcagcgtgatggccgactggtctttttctccttttcctcaaagattatctacttcttgctggctacctatctcccagcctttgattacactggctcagtgctatctgacccatcaggtcttggctccctggaggttcaagggtggatgcgttctgcaccctcccttacctgctatcattaggtctctgtttaatttgctgcctaagggcagtgctgggtagggcccttggcattttatgattgttcagtggacttgaaccagaaccttgggnnnnnnnnnnnnnnnnnnnnaatgcacaggagaggaggggccaggctgtcccagtgaaaatcctccctgccctgaagagtctttctgcttcccctgagctggtctctgcacagtgagcttggctctaggtcacctccctggcatcctggtaggtcgacaacattgggaggcatggccctggctcgttagatgagcaactgctacggaaccacacatctcagctttgtcataggcttcagcagccaggccaggtggcatttctgttgggaggactctcagttctggctctcagttagctgtggctccgggaggcagctgagggcaagatactgaagggtaggaacttgaacttttgtcggaaccattttttgggtttgggttctgtctgagggagcactgggtttggagccacctacagcagctagagacttcctccctaatggtgtgctccggaagtgtgtttcccattctaaggctgacatctcacctgcatgggatgtggcacccccatgcctacttctgctcttgagaaaaggtttggggaggagaaactggggagacttggaggctgtgttaaattttgttctgtgtggtttttctcattaacttgttagacctcattttttattattattattttcccttaccttttatttttttattttttttattaggaccctgttactgtgtccttgcttctagcataactttaaaacttctagacatctaacattttaaaattgagtttcaagtgtgatggaatgtgtgaggcctgtcatcagcccggctttaaggagcattaaacactctatacgaatatagagttaccattttcaggacattgtgtacctttgaacagcggcagatagagactgtcattagctggcgggtgatactcagcccatgaatgtgtaaaggaatgcaggattagcagctaggccagccccacctctgttagtagcagctgtgcgacattactgacttctctcaccatctctgccgtctgtgggttcagtctagtatgtgagagagaattcatgcagaaacgagaagaggtggtggaaagagacttgttttaaacaaaggttgtgttggcagctgcttggagctatttggtttgctttggagcaggctcgttcctggctagcctccatcctactcccaagtgtgacagatgcccaacagccatttgtctagtgtttgatgcagacataattaatatttttttgactatacnnnnnnnnnnnnnnnnnnnngctgaggtataagtaatcgcataggtgaagaaacagacctagaaaagctaagataactggtggagctttcccctgggctgaatatcagtctttccagctagcccaggcctcagacccggactgtgaccactatgcttgctttctgaccatctgttctctctctcacagagagccagctgctccctgggaacaacttcaccaacgagtgcaacatcccaggtaacttcatgtgcagcaacgggcggtgcatcccgggcgcctggcagtgtgacgggctgcctgactgcttcgacaagagtgacgagaaggaatgccgtgagtggctgcccatggtggtgggtggggttggataagggtggaattccaggccaagaacaggagtctagcttggatcttgctccctgtttgctatgagctactgggccagctgcccctctctctgggtgcagtgtggaccgtgcagaagtgtagtatggtagaggagcccatgcttggatgagtagaagtgactcccattaagccctatggatgcctttcctggatgctactctcacctttagaatcccaggcattacattatatggtgcctttcagtcagcaaggaccgtgtctgctgccttggtccagggctggagacttacatgtgactatgtggtagagttctccctgatgattctgtgagacttagtattatatacggagtggatatgtccctatgctgccttacctcctttgcccggtacataggcagggtctggatcttccactggatcatcccctttccagagagtaccagcatggtatggactctgtgggcccttctacccgtctccttctttagcctcttgtccatgttgtactctgaaacatgcataagatctgggctgagaataatgcgcaggagaggagacaccttgtggatacggtatgaactctgtggtcctctctaccccatctccttctttagcctcttgtttattttgtgctcttaaacaagcttaagatccgggctgagaataatgcacaggagaggaggggccaggctgtccagtgaaaatcctccctgccctgaagagtctttctgcttcccctgagctggtctctgcacagtgagcttggctctaggtcacctccctggcatcctggtaggtcgacaacattgggaggcatggccctggctcgttagatgagcaactgctacggaaccacacatctcagctttgtcataggcttcagcagccaggccaggtggcatttctgttgggaggactctcagttctggctctcagttagctgtggctccgggaggcagctgagggcaagatactgaagggtaggaacttgnnnnnnnnnnnnnnnnnnnncctgttactgtgtccttgcttctagcataactttaaaacttctagtacatctaacattttaaaattgagtttcaagtgtgatggaatgtgtgagtcctgtcatcggcccggctttaaggagcattaaacactctatacgaatatagagttaccattttcaggacactgtgtacctttgaacagcggcagatagagactgtcattagctggcgggtgatactcagcccatgaatgtgtaaaggaatgcaggattagcagctaggccagccccacctctgttagtagcagctgtgcgacattactgacttctctcaccatctctgccgtctgtgggttcagtctagtatgtgagagagaattcatgcagaaacgagaagaggtggtggaaagagacttgttttaaacaaaggttgtgttggcagctgcttggagctatttggtttgctttggagcaggctcgttcctggctagcctccatcctactcccaagtgtgacagatgcccaacagccatttgtctagtgtttgatgcagacataattaatattttttgactatacctacaaacacatcgcctgtccagctttgcattcaatggagaaaacaactcctgcttaggcattaaagggacgtgaacgttcctttctaagagacaatgagctttcccttgaagtgtctttcagaatcttctccagccatggagctcagtgtgagatttggaagaagaccatccagactcaaacatggtcctctcctgcatccttaggggaatgtgtaatcttagaaatgcttccagaagctgggcagtggtggcatacgcctttaatctcggcacttaggagccagaggcaggcagatctctgagttcaaagccagcctggtctacagagtgagttccaggacagccagggctatacagagaaactctgtcttgaaaaactgaaagaagaaagaaagagagaaagagagaaagaaaagaaaagaaaggaaaaggaaagaaaagaaaagaaaggaaaaggagagaaaagaaaagaaaagaaaagaaaagagaagaaaagaaaagaaaagagaagagaagaaaagcttccagaatattctaattgagcaactgctggtgggattgaaggacattcttccccctgagaggactccggttttgtcttctctcagtgggagcaggacagcgtctaattgtgagcactgtggtgatgtcttagtatgtgtgctgaaattagtagcatggagcctgtggtttataagcacacaaagtgagctgaaaagcagttcaaaacacagcaatgggtagtctgtgtcatcagggcgtgattgtatggattttatttttcttcccccattttcatgtgtgtgagctaagtatgtacatgtacaggtgaatgcctgaggttgctgttagaatcacccttcattgctcttccaacttcttcattgaggcaggctctcttcttacatgaagtaccgatacggccagcttttcgagctagctttctctgggctttgcttgtctctgcttccaaggctgcagttactgggtgagatctgaactgcagtcctcatgtttgcgagagctttagccactgacgcgtcttcccagcccatgccttgccttctctatttaacatgagctgtgtttctgtgtattgttagtcattgtatggtgaaaatatatgcactgcaatttcgccatactctattgcatgtcctttacttaaaaatagacttacctttattctttttaattacatgtaaatgtatctatctgcttgtggatatagtccacttgactactggtaccctcagaggccataagagggcatcagataccctggcactggagttagataattgtgagccatctgacatggatgctgggagctaaacttggtcctctgaaagagaagcagatgctcttaaccactgagccatctctcccaccctgttccgccttttggcttctgttcatcactgtgtttagcatcacatagaaacatcctccgcaggtgacaggatgtgtggtggggtcagcctgggccagcagcacagggctgagggcagaggtgaagagttcactttctctgagagcagccaccttcatggaaggagtttctttgaaacaactgtctgcctcagggaagggcagggagggggccactgtgacctctgggaggtcatggcatccagcactctgtggcaccttggcatggagaagataatgttttagaaaagagcttgcaaatccttgctcttttgaaagggcacagggagcctggagatgggtcccgcggtgggatgtggtcttgtgagcagctgctttgtatctgcagtagaggaaagacttttagaaaataaggaaaaaaaatctatcataaagggtttttaaaatatcacatattgcaaaaattgagtggaggaggacaaaggaatgtcatcggagcctgtccctgtgacatgcactcagcatcttggaagcttttcactcaggtttttcccagttgcaatcaccatggaaagtccagtttttcatccccagtttttccattgcgatttccccatgatgtcctcttagtgatttttctataattcactatcatgtaatatcttagtttatgtgcattggtgttttgcctgcctgcatgtctgtatgaggatactggctcccctggaactggaggtatggacatgtgggtgctgggaactgaaccctggtcctccagaagagcagccagtgctctcaatcaaggagccacctctccagcccttctctaccattttaattcctagataataatccactaatttggtatgatattactgattatgctactagtcctttctcttgttttttattttttaacttttgctgcttgggattgaacccaggacttcacgtgtcccaggccagtatctgccctgagcttcatctttatctctccctgctaacgttgttcggctttctgctactgaagagtctttggcattgacagcttgacagtggggatggcacccccaccacccatttcccaggactgggttctcagaaacaagactgtgctgtagggcgggagctcttcctgcccgtgtccgcagactgcccgcttgttttgctataggcctgcactggtttgctttcactggccaggagtgaagtctgggacctattttagtcttggcagcgttgagtaatatctttaaaataaactctcttttcctggttattttaatagttgagagcagttcatgtattttacatttttaatttttttagttaacaaggtagaatgcttatatttttagctattagttttatttctttgtgagatatttgttgatgaattgaaattaactctcgcctgggccttgcgggtattagctgttgtgcagagtgcctctggaggacctccgctcagagctggggctcggaggctttattttggtgtgctagttcttggctagtgaattgccctgagtgataagtttattcaaattgcttttcatgtcttccctctgtttctgtggtaataaaatgatgagacatatgtgtcaggaaacgcgatgcctccgtgagagcgctcactttcaggagccacagtgagtatgtgcttgagtgtcctgggcaccgtactgagccaggcaccttatgtcctagagcaacgcattgggttgccacgggagctttactaggaaggagctgtcgtcacagaggcccagcaagcacacagagcttgcatgttggctctagaagaccccatagccttcctctatcagagactcccaagagtattttttgttcacctgtgtaggtgacccttcgctgatcttgtggatctgtattacccgtggatctatgttacctgtattgtgcttgttgtagttaacagaaattcctgcaactaatgcaaaagagagtagttggcttataaagaaagagagttattttggagtttttaacctcagaacccagttggctctgttgcctgtggaagatggtgtgtcgtggtgggagagtgaacagtgaagtgaaacctcatgactaggaagcagaaaagagaatgaggaggaaggtcccgggtctcatcatcctcttcaggccacccccaatggcctaaaggcttcctagtagactttttctttatagtgctattatttttaattatgagtgtttgttctctcatgtgcatgcacatacatgtttgcatgtagccaggtgcctatggaggccagagggatggagatgtgaactgcccaacatgggtgctgccaatcaaactcaggtcctctggaagagtagcaagtgctcttaactgtcctgtcagatcactaactctggaccccacctcctcaggctccgtcacctccttcctactcctgtcagtaaaactttaacacttgggcctctgagggacattcagaatacaaactataggaaaaaattcaacacatcaataatgtttttctccaataatgatttttaaggtggcctttagtcctatgggcctctgaaacctcttcctagaagcagagtcccatccccagtgctaaagcagaggcacagacgtctagagccgagtgccttgagaccttcctgttctgccatgggcttttactgttatctctgtgtctcgacaaactgttgggggttcctcctcacaagtgggattagttctccttgggagaatttcatcgtgtctttggtcacgtgtggcacttttatcatctctgacttgtgtctggtggagtgtggaggagaaactaaaggatgttaaaagaaaacattttaatgaatctcccaaaccagagacgtgggaaagtaggtgcagacttggaatccgaattccctctgcctccactgtgccccgctcttgcttactcattgctcaggcatgatggtggaagaactggatagagtttcaggggcaagtgtggaactctggtcccctagaagtataaaggggtcctcctcttttttttttttttttgtcaccgtcctaggcttcttctgcctctagatggcaccacatgtaacattttcttttaaaccaactaagttggcatggactcagagcaagcagagggggaagtggagtttgagtttgctagcctgaacgggacactggctgtttcaataagctgccttctaatggcttagcatgtacaaagactggggaatccaggcttgtcatgggctgcatgcagcgtgcttcgggatggtggccattgcggtgttgtggccagtgaaggccggaacctctcagtgagttgtgggaggcagctacagctgaatggatttttccctttcagctgggtccaaacagaattgccgaaccaccaatattttgaatcaggtaatgctacctgctgcagtctgaggttgaaatccttccgcacggtgcctctggattcgaccttgcttggtgtggagtttagcagaatggattagttactctgcttgctttgtgaccaaatacctgacagcgtagaagggaggaagggggtcattgctccctgtttcagaggagccatcctgacggagagggcatggtggagaagtgcgcttcatatcctggtcaccaagaagcagaaggagacagtacagggaagagccaaggcaagatgtcacccctaggactcatccccagtgacttcctctagctaagcctcacctcctgcctttcactgtgggataaatccgttgattaggtctgagaactcaggatctgatgttctctgaaccgtgccccacccccaaagatgtacctgaggtgtgctttactgagcttgcaggcatttcttaccccactggagttgacagtcacaattaagcaccgcaaagacataattgaattaaaatgaggtcacagagtgggccttaaatgatcacagctgaagtccttccaagagagaaaatttggactcagataccaagagacagaaggtgatgtaaagccacagggagaagaaagccggctgtcctcgtgtctcatatacgttgattttggacatctgtcctccagaagttcgggaaaatcagcttctgctgctgaagccgttcaggttgtggaagctggctacagtcaccccgtacactagcacagccatggactcatcaccgttgtgttttaagttgtcacctagagatgcatgcgtgtccaacacttgtgaagtgtgatgactttcacaggcatcggcttctgctttctcggtggtttgaacataagagcatgttcagatcttaattcccagtaaccaaggacatgccctaacttggaaattgggtcactgcagatgtgaatagttaacatgaggtcatattatagtagggagagcccttattgcagtctgcgtggtgttctaagaagataatgtaaagacatgagggagggatactgtctgacaaggaccgaggtgggagtgacacagccttcagccagggatgccaagggttcaccgtgctccctagaagacaaggtggggtgaggaagggaatccgcctggagtcgatgggggaattgtggccctgatgaccacttgatcctgctgtacaacctccagggcttttcgtttacaccgtccactctattggtgaagcttcataatggctgccctgggagaggactcttctttcttcccaggggatcactgggaagacacgagtgctcccctgggctaacctggaagcagtggacacgggccttttttttttttttttttaaactggcttgccatacttgctccatctcttggggacagtcctactctcagtttctgcttgaatatctgctgtgtcacatgtgaagtgtccctattcctgcaggtcttaactctggctagccctagtgaagtactgaattccacaggcttctgaaggagttggacttctgacaacagaagtggccctcagagtggcccagagactgattgtggtttcatgctgacccatgtgtatactcttgtgtgttctttctttcctacttgtgttattttgctgtgtgtttttaaatacctctggtaactcagtcacgtccagacccttgggttcttccatcccaaaggtgaaatcatatatcctatagttcagaacagggctttagggccagaccatgctgggttctcacagtccccgacgccctcagtgctactatacttttctcagcacatacttccttggctataagataagggactgtctccgcaccttcaccagagggcatgttcaaatcattcattgcatgatgtaatcagaaagaagctgatcttatccaataggtattgtgcctcgggcaacagtatactatccacctctgaacaagcagaaaattgcgtgaggtctctatctgcccagcatggtatggtcggctgcagcctccacatgcccggtccctcaccttcctacactccagtaagcgaggctctgccacagaaactgttttatttcctggctcaatatctttttgtttgagggagtctttagccagccaatgtcaaaatgtccttcagcttatctctctagagagccagctggatacccaagctggtgccagagggaaaaagaacaaatctttgcagacctgagttgagtgtggctcttggtggagcctcctctgcattcttcccagagtctcagcctcagtgaacctgcagtgaacctggagttggtccccaactgccagagtggctgtggttggcttgtcctcagagctgagcatacctatgtggatttgtctggttgtgttccgttttgtgacctgtagccttctccagtacctgtgcatagagacctttcacttcatacactggcctgaaaccattttaaaacttgatgcagacgctcctctccctcttcccccacgcttgcattttatacctgtacagccgccatgagaaaagattcttggttctgatgttagaatccctcattcctaggtaggacctgccagtcacctatataggaacaaatccaggttgtcagacttcccataaatcttctctcttgcagcctttgcttaagagaccccggtagttctgcttttgtttttcccaaaagatgccagaagttttgcatgaggaaaaaaaaaaagacaaagtgctccccagctcgctgggcttatcagtttcttagaacttctagaacactgtatcacaccccggatgacacaaagtggctcttccacagttttggagactagaagtgcaaagtctaagtgtgaggtgtgccctctctggaggatagaataagtataaatatatttaaattggttatactactctttcttctgtcatgtggtatctcgactcctccacttctgtgatgaggacacactcagcgtgctggttggtgagaacgcagcctggcagagctgtgcttttctccgccgtgggtgtgggtaggcagcgtgctggagatgaaacaccccgtcgccagctttctgccttccagccccgcctacggctgcgatgtccctgctagttcagggcctttaagtccagtgtgtttgccttgcgcagaacactaagaatatgggttagctgctaatctttataaattgtaagctcacacatgaaaattgggcttattagattttcttttttaaaaaagggggggaggggagagcaaaagagagattcaacattagaatctgaacttgccaaaaacaaaacaaaacaagaaaaaactacacttctcatttgccctgcctttcaacttcttgttcatctgaaggcagtcaagatggctatagctgtaaatggattgttgtcctgtccatacgatctgatagagtcaggaaacatgaggtcctagaatgaccaccacagtgttttggtcttcgttgcacataaagcagtggcgtgctctgccatcagcaccatcctagattgacggtattagatgtttcaaccaaggcagttgaacatttccccacagataaatgcactatgtgtgcatgccttccttagggtgttgggcaggcaggatgagagtcatcatgtacagtgggagggacctgctgtatagccacattgtctgtgtcatatcctatctccatccagtggaactgtggtatctgggcaagacactgccttggtggcctttcgattctgtgggcattggggaaaacaaaatggagcccaaactttgtttcacattcttccctcagcagctggcatacccagaacactaattgaactgttactggcagaagggtcacttcctggcatagactcctcacctgcccttggcattttggagcttctgcttccttgtctgtgaaattggaatgggacagatgtgaagacataggaagaatgtgtgagcaccatgtacccttctggtacttaacaagggttacattttgtgttctgtaagaagaattttaatacaatttcccacatgctttttttaggcatcaaaggcaggttggattattattcatattctaagttaaggagggtaaacgacttgatccgaagtcatcatggatgttcagagaaacagtacatggggtaagaatgagcatctctccttcccagagccatttgctggagataggataactggacttgtgatacggggtgcccagttgagtatcgctcagcccctgttgagggacacgcgatgatggcagtggtccatctccagctcagactggaccatcgcccaccacttggaaggtgagaagagtggctctctactaggagtcgggacagaagactccaggctttggttagggaagaagatgagcagatctgtggaatgaaggcttccaggagtttagaaagaaatccaggaggcacatgctggatttcgtgtcaccatgaaaagaccagcctcttaatcacagaacatcctaatttaggcacagttgtttattattattgttaatatttattaccatcattattattgttgttggatgttcttcttgttattgttactattactactgcttctatatcaaagcttcttgtcccatatccctgcccatgctcttctagccctgttctggtgatgacagggaaattggacatgatgtactagaacatgaccaagatcctctcagctttctgtgtctctctaagtagaagctgtcctttgggacctgtcaggaaacttccagtttaaatgcctgccctgtcacaccacccttagcagtgtggagtcatctttgagatcagctcttcacttcaatttgccttgtcccatctcacgcccctcccgctttcagcaagctgcacagttatcagcatgggtctgcctatgagagaatcctgatgaagtggttcatagtgggggtgggggttcacattccagtgcatctggagtaaatatggccaggtccacttgggccccctgtcatttgggcaagctcccagttgccaggtcttggctgtaactgcaaaatacagtcagtggtaacgggcccggtaattgctaataaaatttaaatggctacaaaattacagaacagagaaacaaaattctttttcctggcacatccagaccagtcttgtggatctgagttaggctgtgacagtatagttttttatttttgttttttaattcatactcacactttgggctgcgacacggctcatgtgcaattgcttaatggatttttttttttaaatctagaaacagatgaggaaaaaataattttacaaagataatgtgttgcattcttataatgcaggcacgactagagagtctctaatttatttttacaatatcaaaattatatgcaatgtactgtgactgcatgcaacacccgctgccctctcttgcccccgttctgtcttactgactcccttctttgcaagcagacccctcctaccctcatgtccaccctttcctttctctcacagagacactgtctgagcctggcaccttcagaactgatcaaaaacctctggctagactggcatggtggcctgtacctttaatcgtggcacttggaggcagagacaggagaatctctgtgagttcggggccaaactggttcacatagtgagttccagaccaaccagggctacttacagagacccctatctttaaaacaagttgtctatgactagggaaattacagatgctatggaggagttttgccaaatagacacgtagtcaaatctgacttctaagtatttatgtttatgatggaggactggtacatctcttagccttcatcaatgaagccgattcctacaaaggtcaaagtgggaacccataactgttcaaagtcctgataacaggtgacttactgaatgcttggctccaaatgggcaatctgtgtcattccatacaaaacccagtggacatcatggaagagaggcaggtaggactctgggaaccaaaggatgaggagtgtggtggacgctgtcttctgggtatgacatgaccattgttcaggagggcacagcagctgtgtcttcctgcatggtggtggggatggggatggaactagtgtcttgtggtgtagttcttagttttcttgtgggctgggctggaaaggatggaagtgaggccaaaggcaaaccgtgaacccctctttaggaagtctcaggaacttgtgactcttggtgtagtcctataaaatctcagcagagttgaagtataaaaacctgttatgtagtgtggagggaagggacggacacaggtgacacacacatatttcatgtgcaacaggaacagcagagcttcagattaattccacattaaaatacagagtctgccttcctcgggagcaagacatttgcatgtgctgcttgagatgcttatttctgccgcccaggccctttattttgggaggatgagggaggggatgcaggcaggcaatgttccagatttagcttgggcttgaagaattcaggatcagaagcctggcttggcttgcttggtagtcagaaaggctctttgcctctcttttgggggtcaggtgacacagcccgggatgtttactgagctcccaaagggggtggggagaatagaagcccctgcttgtccccttgtaaggcactgggagagagggcagacaggggattcccgtttggaatgtgcatcggtggaaaagtggtctgactgaggagcgctctgatctgccagttgctttggccatttgaacacttcagtcatcgtcttagttattcttcctgttgctatgatgaaatgccctgagaaaaataacttaagggagaaagggtttatttggcttacgatgatggactacatccgggacagcagtagcaggaagctggcgggtcgctttgcatctgtactgaggaagcagagtgtgactaggaaggagggccaggctggaaagcttcaaggctggcccccagtgattttcttcatctaatgcggcttcactttgtaaagatctcacaaacttcctgaacagcatcaccagctgggaagtaagtgttcaaagttgtaagcccacggggacagttcacattcagaccacagcgtccgtgagagatgagtcaggagctggctctccccgtagctgtgcaagcatccccaagctaccaatgcctgccctcattactctactctgtggccttagatctcaacctcacaccttgttcttgagcccctggcactgctgcccccgggctgctcacaagacaaggtcatgcaccctgtggcctgcacagtagtgagcaaagctgccagatgtcagagaagttcttgaagcagaactttctagtctctgtcacttggtgtccctcattaaatcccaaaccaggattgcttcaagtacccggaatgcaggccactgcctagcctgatgttgccagggtacaggagaggaattggctgctgctcagtttctatacagtactgcagtgcatcagtgggtgctgtgattcaaggcctggatgttgtgtccccacctcttctgcccttgaacccacccatgaggtgggcatggaggtaggacttggtgctttctccgcttcttcacttggtcttcccagtgtcccgggtcttactccacatggctgctcttcccgacagcaggcgtagtataaacatttgttccccacagctctggagatcaagaaggcaagtagtgtctgagtatgttatatgtggtgtctggtgaggccccacttcctggcttactggatagcttcatttcttgccataccacatgatgggacagatgaccctgttcctctgtcctctcttagaagggcaccacttgcactgataaatcaaggcttttcccttatcacccaatgagcctatcaatatgaaaggtatgggagggagtacagcatcccttctcaggtggtggcacgtgagtgacatctcagtgacaatgtcggcctcagaatcagtctatcctaaaggagtgctaaggtgactgtgatagtgaccacaatgtggcttagctcttccttctgacttcaaggttcctttatttgtactatctttctttttttttttttttttggacagggtttctctgtgtagccctggctgtcctggaactcactctgtagaccaggctggctttgaactcagaaattcgcctgcctctgcctcccaagtgttgggattgaaggtgtgcaccaccactgcccggctcgttctatcttttatatcctcgcagctcacgatcatgctgaggttaagttcaaggatctgagtttcgtgatcatgccaacggtcttggtctatagtagccaggacgttggctctggaggtgactgggggagaaccttggatttttcaacttcaaggaagtgttgagcagtggttatgatacagatgttgccactgcagacatcaggatggtcttggtattcaagagatatcctggggtggcagcagaagggaaaggcatcagactgtggagtgagctgggcttttatggaaagagaggaggaggaagaggatggaagagaggaagagtgaggaaggagggtctggtagccaggaagaggtgtggatggtgtgtgggtttaagaacggcttgcccagctcttcagggaagtccttggtccacagatgccattgtaggagcctggtcctcccagagatgctctttagcatgagcacccctccccactcttttgaaaggcactaatctcactgcaagggctccaccctcatcacataaccacctcctagagggcacaccaaatgcccctgtgtcaaggtcaaggtttccttacacaagtctgaaggaaacacaaggagtttcctgagaagaaaaagcagaataaagcccaaaggatgacaagtattctgcatgtttagctttgcataaagtcattcctaaggataagggaagggtttcaaggatgcttatcgaagttgctaagttgctggtgtaggacctggagctgccaagggaagagtgtagctgtgtggttggtggtcaagagtgggggctgcagagtcccaggagaggaccaaatgatctttgactattttctgctgtgtgaccctgagcgagccacttaacctctctgtacctcagcaaccgccacatgtgtaacatgagagatgagtagttcttatgttagtggcttctgaaagacgactgcttgacaccctcttagtacatacagtgcctgtcactcagccagccttcaataatgcctgttgcgattccctgtcattacctcatactttcaactcccctaaaaagttgtcaggtaaaacagcttcaaatgctcgcccgctgtcacctgacagccactgcactacccacaatgccgtgactaatacatcttgtggaagaatgcaagaatattgtaggcttatcttgacagttcagcatgaagctgttcgacgtggtgtcaccaaaaaataaaataaaataagaaaaataaaagttctcattgagtttgttcctgaatagcagtgaaagaaagtctagctcgtttaccacctggggctagcagctgttaggaacagcccccagcctgcctgtgcttggcaggacacctgactgccttgttattatagacacaggaatgactcaaagcctgcttgaatgaaatctcccaaatagggcatctaggaatctgcatctaagccagcagcccagggagccaggggtgtctgctgtatgctgaccccaggtgccaaggtagattccgatcttaatgcatgaggtcatcgcttggacaaaccttgcatctttcgatatgcaggtagaagagatagatgcgcagcatgttgtcattctctcaggtgcaggcagccgaggggcatctctatcagggtgtgccttcagaagctgtccaccctcaacagtagtgctaaggacctgacaccgaccacatgtgtccactcttcgttttgctttaaaggccccttcctgcatattcttccctaaagacatcatcaggtggactcctgttgatcttgtgagaaaatcatttcattgggccagaaatgaacttctcggcaagagcgggggggggggggaggtgtgtgtgtgtgtgtgtgtgtgtgtgtgtgtgtgtatgtgtacccaaggctggaacaggctaccctggggttagtgctgttcctttacatgtgatgcccatgtgtgaatttctctccactccagtttgctcatctgtgaaatggggaaagggtgaaatagactctctccagctctgtgactgaattcctcactcaaagcaaagcaaagaggaagggttgattttggcttacagcttgagcggatccagaccatcatggaggaggcatggtgggaggagagaggtgactggtcacgtcatatctgcagtcaggaaggagggagagggaaaaggagagggtggggaggagaggggggatacctctaggtccaccacaactggtggccacatgagcctatgtgggacatttctggtagagcttaaatacatttatacctgttaaacagttaggctgctctacaacaaagtctcatgacccttagacttgtgtctcgtggggtatcagctgtcattattaataatcccatcatcatcttcaagacaatgcagcgatggtcatccttgtctgtgaagaatcgaagtacaaaggggaagctgccccgatctcagccgtgcagccaagtgcagctgagagcagccgaacaatggtcaggatgaagtggggttcagccttcctggtggggctgtattgccaattcctatatcattgctttttggactgggcctctggggtgccaagggtgactgccaccaaggagaaaggggaacacagagcagcaggggttttgggtttggacccttttcctgcttcaagcaaaacggcttcaagcagaacagcttcatgtctatttttaaaaaaatgtgtgggcttttacacacttctttgtttccactgagggttctgtggtaaacagatccaaggatgaattcttgctggactccctaagcagccttttgttctctgtctttaaagtcttcctaacttctgggattccaaagaccgcgccaggattgtctcttgctggaacagaactcaagttcaactcactgagcacaggtggtactcaagacatttgttctttataatgagcccccgtctgctttcagagtagcagtgggtttgcagggctgatgagttacctgttagtagacacttcttggctcctaactgcatcaagtcctacttggctccaatctggcagtgtggctgggtcagtgtctccacttgtggtgggaaatgggaagctgttgacaccgtgggtgatgcagtgcgcgtggccgtcagcctgaggagctacagtaccagtgctttgacatcagagagactaggggacagctacaggatcctcttcatgagaccaggaagagatgatctcagacaggcccatccttggtacagataggttgtgtcattcaaggcttggaacatgagtctgccggtaaaatgcttgctaagcaaccctcaccactcagcatacatgtaaagttaggctaaccagctgatagactctctaggttcagagagagagggaggggggagaaaaggagggagggagagggagagggagagggagggagagagagagagagagagagagagagagagaatnnnnnnnnnnnnnnnnnnnnnnnnnnnntctcaaaacatagaggcagaagacgcctgatgttgagctctaccttgtgtgatgcgcgcgcacacacacacacacacacacacacacacacaccactcccccaaccaacctccctggtgcaggggtgggcatctctctttagtgccctgcccaagttttcagtattaggtggctatgcctttcataattcaagaggctcccagaagaagctgtgactctttatggggaatcatttcatcattaaagcttatgtctacccagacagtgaaggaccaggttcttgctctgcccttcacccccctcccctccttgcaaggcatggttgagaagaaaacatcagctgcacattgaataatcgtgctgcgatgcaactctcaccttggcgcatgtgaacgaccgagaaaacaatgcccgctttccttgggctctctagttaatatcccttggtcttgtgccagcctctccctcgacttctacatttcagaagtattttgttttccattgccgacaggaggagtacaaaggcagatggtgtcatcacctaatttgttaattctgccagactttcttctcctgccaatcagcagtcatccttaccggctcatgtttaaggacagccttgaggaaaattacagaggagcagtgtcctgtttaccctgcgaatgaatgccgagggcttgggtaaaatcagaacaaaacaaacaatttaaaagcagcacagtggctctgagtgaattcaagggtgggcagcgaggccgctgcagaggagcggcaggggagccctggcttgctgttcttgaccctgcctagaacttagcatggggtatttctttctgagccttccttcccttctaaagtagaaacgtgccctccagcaccttccctggaatactgattatttacaggattgacatcatgcagttctttgaattctctcctggcttcagaacagaactgtgtaaaacagcaacagaaactgtggtgaaggaatgtgagccacatgtgggccactgctggggccgcatcggggtcagtggatgcttgccttgcagatgtgaggatgtgagttcatttccctggagcccttgctttttgttttgtttgttttgtttagtcttctgagagagagacagagacagacacagagacagagacagacacacacagagagagagagagagagacagagagagacaagagacagagaccctggtgtggtaatcctaccactagagagatggtgtcttaattagggttttaccactgtgagcagacaccgtgaccaaggcaactcttaaaaagatgtttaattggagctggcttacagaatcagaggttcatgcaatatccaggcaggcatggtgcaggaggaggtgagagttctacatcttcatttgaaggcgggtagaagaccctaggcagctagaatgaggatttttgtttgtttgttattgtttttgttttttgtttttttcgagacagggtttctctgtatagccctggctgtcctggaactcactctgtagaccaggctggcctcgaactcagaaatccaccggccatgctccagcactgcctggcgagaatgagggtcttaaagcccatgcccacagtgacacacctactccaatagggccacaccttctaatcgtgccactccctgggccgagcatatacaaaccatcacagatggtagttgagtggatgcctgtgattttcttgccagccatcctaaactacttggcaatatccaggacagtgagagacccttaaacaaacaaaacaaggtggccagtaccttagaaataatagctgaggttatcttctggcctccacacacatgtgcacacctaccaacacatgcatgcacatgcacatgcatgatcacttatacacacacacagaatatgggcctggtgttcatgcttgtatttctagcactccagatgctgaggcaggagaattgcaagttggaggctagcctgggttacataacaagttccagactccattgggcttccaagtgggaacctgttttaaaagacaatcaatcaaaacacaaacaaaataatgtggataggtggttgggtgggtggttatgttgatgatggatgggtataggtaaatgaaggagtcagtgcatgggttgatgagtgcatgggtctattttcaaaccattggtgggagggagggatggatggatgatggatagatggatggattaactgattggtgagtgggttaatgcatgtttaggtagattgatggatagatttgtcttggtacataaaaagaggaatacctcactctgtagccattccttcccagaaatctttgtcccctctcttccccggcaggtagaccttctttcctccagttcacatagaactgtgtgtttctacctatgacttgtcagcatcagatgcaataaaggccatgggtgtttgctttctagggccattagacgttttcagacagccagcaaaaggcctgaatgtatcttgctcagttttcccagcaacaagcacagtgcgctcccagcatagcgtatatttgctgagtgactccatcgaggaagaaagactgtttggaaatgcacggacaacgtgtcctgctctctcgtggccgctttctcggctaggcttttcctaacaagtagccagatagggttgctaaagagcagcagggttccttccatctgccacatgcacacacagagatacaaccacatacagagacacacagagacacagagacagacaggcagagagatagacagagacagacacctcccccatatgtctctcaagacttttaaaggacctcttgattgttttaacagcctgtcttcacaacgtctccttctgcttcatccctgtttcctgcctgttaagtaaccattcttcccaaagttggatcccagtggatgtgaaccctgggacacccctccctgatgagcatttgaggatacctattatcttcatcctctgtcattacatcctaatgttttgcttagattttaagacagggacagaggctaatgaggggcttttgtgcccaagaacagtggaccctggcagcttcagtggcttttgtatttaattccagggaggtagggtactcatagtgactagcagggtttcaggggaagagacaggcagctcagccagctgaaaagatgcagccnnnnnnnnnnnnnnnnnnnntctagaagaccgcccccccctcctcgtggttgttactgtcactttcgcagggttgtgcaggagccagctcttgctgtgggtgagctgagctctcgagctcccctaggctctactttcctccactctaaagggacttggtcatctctaagcaccagatacctatgattgtccgtgtgggaagacagaaccgtttgctggcacacgagcacatgtgtaggaatggattttgaattgtttacatatgcaaaaagattggactcctagtgagcagagtatacagaggcactctggggtcagtgccttcctgggaatattgttgcaacgttgtacaccagactctctgctcagtgctctgcatggctgatatcataaagaattcagattgccacactaaatcccacagacacacaccctttatataggattgaagcttacaggaaaggtggagccaagatatgaatacagacattccagagtgagcctaaaccattgttatgctgccccctgcaggtcagtgtatggcctggctcatcagtgtggagggttttgaggagccttagagattagaggcaagaccctgtacaacatatttcctctgcaaaaaatggggggaggggggaagagcttgaatatttagtagctgaagcaaattctaactgctcttcagttccagagcatgcagcagggacttgaaacatcagaaccacaatgggagtctccctcaggggtgcctttcctggtaaaaatcgacagctggggagctggctcatttgggaaaatgcttgccttgtaaaagttgtgagaacctgaatttgaatcccaggatctttgtaagaagccaggggtgggagtgcacatgtgcatacctggtgatggtgagacagacgacagacagagacaggaagacccctgaaggcttgtgggccactagcccagcatactgctgaaatcccaggccggtgaaagaccctgtctgaagcaagaaggctgttctctgacctctgtgtgtgcatccttgtaccatccccaccacacacaaacccagcaggagcatctctgggctctgtgcactaaagatgtctggcaggttcctaggaccactgacctcagttcccaaatcctccctgaaacggtccctgatgtctccagctttataagtcttcagaagctggagtggagggtgggactctgtcagttgaagattctagttcagtaggtccggggcaaggctggctgtgcaatagcaacccaggtggttgctgctgcagcgggtctgaggtctgcatacctcaggcctcaagtctgtgtttcccagggcctaagctggctgcatcagaataatctcagaccttccttccataagcagtgagtctcagatgaagcttaggaagtttctgtaaccactctgacaaacactgccctgttccttgctttctgatagtcgaggtccctcgtggactgaagacaggtcacataagattagttcacaggtctaggtgggggataggagtgtcctatttcactggataaatccactccatactcagacttgggatttctgcaattgtttcttcacatcctcttgtctctcccatggcctcctgcctgctccgctcttttctcctttgctgtacttgagtatgtgcctttgatactccatatcctggcttttgcatctctctcagtaatgaacttgctgcacggatccccaggaatctgctgttaaattgggcaggtggtgatgtccttaagtgcccttcatgcagactgggcgagatccaccacattgtccctccatgattagctggggtggtcaaccatctttcttgtttgccctcttccttcttagtcccttttccctgggccattgttcttctgggagtggttcaacctttccatataataattctgtctggttgacatctgccttttctatactgtagtgttgctgcagggggttccatactgcatgtctgatccagtcactgccctcacaaaaaccatggagcactgcagctaggcagcctggggcacatgctggctggccttgccacttgtcaatggagaaatcctgtatgcactgctgaacttctcttgactacagttttgaatgtggcggagtgggtacagtgccgtcctggttagcttttgttgtcaaatggatacaacctagaattacctgccatgggggaaatctcaggagaagaattgcctccatcagctaaacttgtgactatatgtgtcagccactgttttgactgagatttgaagatcaacattcaggcccactatgggtggtaccatccctaggcaggtcgacctggagtcgacaagaaagctagttaagcatagtgcagtgagttagcctgtaagcagcagtcctccatggtttctgcttctgtttctgcttgagttcccgatccgacttccctcagtgctgggtaaggcctttcttcccctaagttttgttttatcattgaggcagaggttgaaattggaacaagtctttagctgggaagtttctattcccaaggcggaggcctgttgagctccccatgaatgtctgccttgagttttctttaattatcaggaataatgaattgaagtaatagcaatctcaatgggcccagatcacaatagaatccagtgaggctttgaagtgccttacaaaacacccttatctggccctgtgattcccactggctgcgcatccctctcccatactctacctttctgccctgtctcacagctctttacgtatgtcctgtcctctgtgccagtgcctttctgccaaggcagggggaggggatccctttcaaactgcccctgattcctgcaagaagagagggtcatctctcccttcctgttcctgctcattctcgggggcttttgtgaagcacatgtgcatctctctgtacgaaacgtgcatgatcgtctccttgacatggtgtgcttctgaagttagggtggcatccctggtacagctgggactcgttgtatgttgtgtgaatggaggaatgatggattggcgcgggaattcagaagctgatccagtggctcagagggccagccttcaggatgcttgagatgatcttgccttgttatagttgagaacttaggagtgaaccttgagccctctctcttcctaaccatctctctgcttcactagttcagcagcgagtccagccagcactactgctaaagcagtaggtttcagccaggcatgatgctaacatctcacaatgatggagatggcttcgatggtcactcctagggccagtgctagtagatagtgggcaggggctaaaagtgatggaaaaccccatagttcacagggaatcctctgcacagccaagaatcacccaaccctaatgggctgagttgaggaacccatcctggagaatcagagtccacccagagctgtccatcagtattcgttgtttttctcatttatgtgaccagagacctgtcaaaagcaatgtatgggggaaggaattgtttggttcatggtttgagagggtacagtctatcacagcagggaaggtatggcaataggaataggaggtgaccagtcggtcacactgtatctgaagtgagcaagcagagagagatgagaacagtgcttcttgcttacccctcctttcctttaaatgacctaagcctagactgtgggatggttccacccatattcagttgcatcttctctcttcaattatacctgcctgggaatgtcctcacagatatacacagagatgtgtgtaactttaattttttcaaatcctatttttaatgatggttcttaaatgctttaacctcccctttatcccaccacccatcagagttagtgaaaaagaaaggatacagggaaagtggacctgtttagaaatggtttttggagcaactcctgtctgagttgtctggaaatcggcagttcagttcacgggtcagcagtggcagctcgatccacttgcaaacacttcatgtttacacctgcagtcccgttcagtagagttgggatagcaaacacaaatcagcagcggtggcacttcttagcagagaccgccaggcctcagcctccagaggagttaacaggaggggccaggaggtgtgcctctctcagcgaaggtcagcgaagatgagcaactaagaagcattgcacagctagctctacaagcaagcctagtcagccccagtcactgttagccacattctatttacacagcctccaaacatcatgtggccttcaactgacatcactctgccaatcagtctgagtccacagaagtggcaaaaaagccacagcatgctaccagaagttttttttagaacatttctctctgtggagtcctgaaaatggagctcagctacacaatgtaaggcggaccaatacatgcatgttgttagcaaagagtccttcatcacgtgttctttcacgtgcttgctttggcaaaacgtgttttctcctgtgtctgcttcagtgaaatcttccttcaggagtctgccttagtctttcacctgtgtccacttcaggaaaacactccttcctgtgtttgccccagcaaaacaccgtctaaaacaactgactctccaaagaaccctttaaaagtttccactttaggtgtgtctcctgtcctcgcttgtctggcatatttgtgtctttcacttttataggtctcatggtaatggcttctgactcagatgtccctgtccttatcatccaaattagcctcacagccactgtcacatggtattacagcacctcatagcactcagcactgggtctgcctgccttcctccccactttctttccgacttctgtgaaagctccttgagagttaagtcctctcttgccttgtacagggttccatccacaatgcttagaacagtgcccagtgagagccatcattgtacagcgagggaagtgtgggaagtgttaatagtgtatacccatggtggagtgtgggaattgcacggcatactctccttacatacagtctccaccatagggctatggagatggggtggggtgctaggataccatgtttattgtcttcattttgcagctgaggagaccaggtgctgaaatttacgatcttgtagaagaccatgtggttagaaggcagcagagctaaactttgaacttgaatgtggggaccccagagttgattgaggacatgagtgtggatgtgaattttgaggctgtgcctttgctttctgagtgcgtatatggtagagaacttttgactgacagggagtcagctggatctgagtttacatccttactggccacactgcatggcgtggtatagagtgtgtgtgcgtgtgtgtgtgtgcgtgcgtgcgtgcgtgcatgggtgcatgtgtgtgtgcgcgtgcgtgtgtgcgtgcatgtgtgtgtgtgtgtgcgcgtgcgtgcgtgcatgtgtgtgtgtgcgtgcgtgcatgtgtgtgcacgtgtgcgcgtgtgcatgtgcgtgtgcgtgttatgttgaggttatacaggagtaccaataatctcttaattcataaaatgttagggttttagactatagctttgcccgcatcattctcactactcaccatgttttcttcatcattttgaccacttggaaaactcaggctaaaaactaatgggagtaacttcacaatagaacattttgtctacctcctttgcttctgcttttccatagcatcaatttttccttacttttaacagctttggtttcctaaaccaacttaaaagatttatgagcgtacattatgaatttagaagaaataaatatgtatgtaaattgtgtccctgggcaaattattaatctgtgttggtagcgtctgtgcgatgttggtaatggttctcaccccttcatgcttgggggcagtgtaaatggggaagggcaggaagagctgctctaaaacgctagagacgcatttaacaagcattagtgccgtttcttctctgcctacagtgtggatgagagaatgttgacaccagtacttgggctagtaaatgctggaaggtgacttaacggacctgtggagtcactcctgtacaccactgactctagtgagctccaggacaaaagccgacgactagctgtcatcttgattttaagtggtagaataatattagattttgaaagtagaaaggactccacggctgtttggtagaggtggactcagccacagagcccagcctgacaaatagaaagtatttcatgcaagaaaatgaattagactaacaaaaactttatgttactatggcaactgggtacttggccagtccctctttagcttgattataatgcagcagtgaaaaatgtcaactgttacgtctcaattgcttattagctcataaaatgtcccagttcacatactaattgttactggataaagtaatactatattaagagttcaatgccacccatttccttgttctaagccatactgggggctttaaaaagtagaaaacagtacttatgaaaataaagctacttatcccttactgaagctaaacatcttttcttttagcctcacttgtaaggactgttacatcatccctattttacacatgacaaagagctggttagaatctagacccaaagctcttaggcacttaacacttattcttaaaagttaagagtgggctttgtttgttcctttgtttcctttaagaaaaacaagctgggcatagtgatcaatgtctataatcccagcaagaggaaggaagaggcaggtgaatctctgtgagttcaaggccagcctggtctacataatgagttctaggacagctagagcgacatagtgagaccctggcttgcagagggtgggggtagaaatgactgacagataaggctttgtggattgcaggttaacagcatccctagctacctgtcatatgtcaggggactctcccatgcccttcaccccagcattatcatgtgttccttgtaagcaagccagaactagggagcatttagctaatttagaaccttccagaaaaagagccactcttttatttctgatgtcacccatattcttagatcttaggaattctcataaaatttggtttctttatttggttatatcagagagctatgcagttatgtcactaattttagaacatttcatcactccaggaagaaatgcttgtacccattagttctccatctccccctcccattcctgggaagcactaaccttcaactctccaatgatttgccttttctggacatttcatgtaagtggaatcattattcatagccttttgtgcccagctctttcatctagtatgctttccaggttacacaggatatcatgtatcagtctttcagccctgtgtaatactgcaggatctagactgtaggtgtttttgttcattttttttttcatatgaatttctagttgtcccaggctttgttgtagactgtcctttgccccagtaaattttcttggcactcttaccaagcatcaatcagctataaaagaaaccagttttattctgttgctccacaggtacactcttattccaacacagacctgattattttgtcctaatgcaaaatactgagataaagaagtgttttcccttcaatgtcatcctttttaatacaatattaactactctgaggcccttacatcttctgtgtgaagttagggtccacttgtctatttctacagataagttaaaggagattttatagggattgtgttagatccactgacaagtgttgcctttaacaaatgttaagtcttacattttacaaacataaggtgttgtatgttctcattgctctgacaaagtcagcatcaggaaggaagggttcattttagattgtggtttaagaagggacacagcccatcctggtggtgggggatgatgtaatgagttaattatactgtatccacaaaaaagtagagtgtaggcagggagtacgccaagctataaaacttgtaaaagtcagtctcaagtgggaacttctggtttctttggaaagtcagttatgacaaatgatattttgctgaagcagatacaggtaaaaggatgttttgctatagcaaacacatgaatggattcatgatgctcaaaaggaatataaacgtgtgaccccacagacagtgggagctcgagcattggtttgctttgcccccaccttgctattggttcatcttacattgtgttgctgagttctgcttgtgataatgccatagagagaaactagccaaagaacttcccatgaggctcctgtggcttcttgctgcttctgtggtctctgtttggtaagagagcctgcggtttcttctggattgaactgcccttacttattcatgtgtagtgactgccaagtggaccggactgtagctcctggttcgtgtatggtgtttgctattgaaccgaaatgatatcctgacaatgaagattggacttgctctcaaagaactatttctaaacaggtctactttcccatgtcctaatatcttttctcttccactacctctggtgggtggtgggctagaggagaggttgaacccttattagagtaggttggaaacaatttatgcctataccttacccctagtaaggcttgctggaaggttagacatctaaaggtatccacaatcttctgaaaaagtgccacctgctggggaccaagtgttctagctcatgagcctgtggggaacacttcacattcaaagcaccaccaatttttttctgtttattcaagttatttctttgaagggtggtgttcagctttcagcacacaagccttacatgtcttctactcaatctattcctaaggatttttactggttttgatgctgttatacatgaggttgttcttttaattttgattcttgattcttgatcgtgggtgtgtagctgaataattgattctcccgtgctcatctcccactctgcagcttttatggtcttgtttcttgttgctacctactttcgtaggttttcagtctctcttcatttttaatacagacattcacacttacaagtttctcacttggccccgagttacatgtattcttcacatttcaatactgttatgtttctatttagaatctcaaactgtttcctccttgcctcacctctcttgtctgactctggatgttgagtgagtgagctccctgagaggtgcatgtttgttttcagcaacttccttctgtggttgatttcttattttactgtactgtggctggagaacatagtgtgtagttctggtgtttcacaatccactgaggtctccttcaagtccttggatttggtctgacatgtgtcatgtgtgttctgtagttgctgtgttctagaggcatctgttgagtctgttttatgtcattttaaaatatctgtgtgtgtgtgtgtctttctctctgcccctctcctctcctctcctctcctctcctctcctctcctctcctatcctctcctctcctctcctctcctctcctctcctctcctctcctctcctctcctctcctctcctctcctctcctctcctcttccctcccctcccctcccctcccctcccctccttcttnnnnnnnnnnnnnnnnnnnnnnnnnnnnnnnnnnnnnnnnnnnnnnnnnnnnnnnnnnnnnnnnnnnnnnnnnnnnnnnnnnnnnnnnnnnnnnnnnnnnnnnnnnnnnnnnnnnnnnnnnnnnnnnnnnnnnnnnnnnnnnnnnnnnnnnnnnnnnnnnnnnnnnnnnnnnnnnnnnnnnnnnnnnnnnnnnnnnnntcctcatcctcctcttccttgtcctccttcttcctctttctcttcctcttcctctttcttcttcttcttcttcttcttcttcttcttcttcttcttcttcttcttcttcttcttcttcttcttcttcttcttcttcctcctcctcctcctcctccttctcttcttcctcctcctcctcttcttcctcctcctcctcctcctcctcctcctcctccttccccttctctctgttgagacaaggtcttatgtagcccaggatctacttgagttctctgtggagatgagaaagtttttcatgctgtgaccacaaacaccacacctggcttatgaagtcctgggaattgaacttggggctttgcatactagattgccaactaagctacatctcagccctggcctttttttttttttttaatagatggtgctgctaatgacttccatttaatcactgatctttagcttattgtatctgtcattgaaggtgttggtgtgtcccgttatttctgttaatctgccctatgtattttagggctcttattttagggcatataaatttgtatatctaaaagtcttactttgtccctaggagcaatttttattattattattattactaatcttccattatctggtgttagcacttcagttctatagatttcaggtagctttggctttgttctgctaatcttgtttgcttgttttgagatagggtctcacaatgtagccctggctggcctagaactcattatgaagatcagtctggccatgaacacatagagatctaccagcttctgcctcctgagcgctgtgattaaaggtgtgcacaaccatgcaggattgtattgctctttaaccctcccaggttttcagatgtgcagccaggaccaagaatcactgctctattaaagttcaggttcaggaccgctgtctttaaaggtcatccccagacactgataggatcacagtcagattatctgaggcctcactgatttgttaaagacattatagaaacttggattctgtttcattgtttcattgctgtgaagagacaccatgaccaaggcaacttgcagaaagaagcatttaattggggacttacatacagtctcagaggttggtccacatcattgtggtgggaagcatgggtccccaccacaggctggaaggcatgatgctgaagtattaatgagaactcacatctgatctacaaactgcagacagagagagaaaaaactgagcttggcttaggcttttgaaacctcaaagctgactccttgtgacacacctccttttacaaggccacacctcctaatccttcccaaacagttcccctaactggaaccaagtatgggggttgttctcatccaaaccaccttagaagccccaatgaaacttttccataactacattcatggtactttgaagacctgtttccctgaaagagttctttctcttgggtggtccttcagagcagtaggaggtgcttgttgcctggcttctgatggagtccccagttactgaaggtaccacaatggctattctttgtgcttccagcaagcattgcagcaattgccaggaccaactcttgactcccaggtcctactgcctccatggattgtgttgagagagctaggtaaaactccagggagctcgttccccaaagcttcctttctgctttaaggagaaaactgttctgtgatttgcacatgtgtgtttacatgtctgtttcccatctcaggaactcacaccaactgtcaggataggttctgctgaacagagaaaagcctcaaagggtttttccacctatatctgacctgcccacatcaaagatcactaatacatctttccaggtctgaagacaaagaaatcagtgctttttttggggggggggaagccttaggtctggtgggggtcatggtaacaggagagggtgggagttctgaaatataaagttttctcatggtaaaggacaaacacacagagacacaccacaccacacacacacacacacacacacacacacacacacacacacacacacatccatttttcaattgccagagtaatagccagaaaccccttctggttagtggattttctaatcccagctttgtctcattgttttgcctcttccccttgtcattcttggtgatgggaccccttttgaaaggtagtgccatgcactttgaatcctttatagtttaaagagcttgtcccatgaaaggttctcagcatcttacagatgtgtctttcttcagactattcagaggccactgatggtactggaatatttcaacttatgtgacctcctactatgcgtctgtgtccatggaatctcttcataagaaacaaatatggcaccttgcttatctttgtaaagatgtcctctggctctcgggctgagtgtgtgtgtgggggtctgtctacctactgtctcagccttgcctcattataccagctccgttttcccgctgccttcatttctcccagacctctgtaacctggcctgactgggaggctttgtccataccattcctcttgccctgagtgcccttccccctccaccctgtggacacacacccggtcattcacacccagctgaggcagctctactttgcaaggtttccccaggctaagccacactcttttcagcccctttgtattcctcacatattgagtgtctgctactggtcagccctttaaaaaaattaagtgattttttaaaaacaatatgaataatagtaaatattgttgaataatactatatgaaataatatattttattatagctactgtacagtatagcaattatagcttttannnnnnnnnnnnnnnnnnnnattcagtcccctcagtagtccagtgagttgataatgtctgatcttgcttcagaaggtgaggtacatagaggtaagcagtgcatcttccatcacccagccaatgaggtttgagcttgggcaggcttataccatccttatgccatccttacatccctgctctgactaactaccaaagccacatggtttattttccttgcaacatccacacttgtcctttgtgtgacataaagacagaatgataaccagccttgatgggacacactcataattctgctgcttgggaggctgaggcaggaagattacaagttccaagatcagcctgggcaatttaatgagactctgtctcaagaaaattaaaaacaactgggtgtggtggcgcacatctttaatccagcacttgggaggcagaggcaggcggatctctgtgagtttaaggccagcttggtcttcagagtgagtaccaggacaaccaaagctaccctgtcttgaaaaaccagatagatagatagatagatagatagatagatagatagatagatagatagatagacagacagtcagacagtcagaaagattaaccgaccaacccaaaaattctagggatataactcaatggtagagtactttgcttgcctaccatgctctgagttcaagaaaggaagggagggagagagagagagaggggttgagtaaggcaaagcacagagtcacaagctgggaaaggatgacactggttgctcctcacctttgtcagggtaagcaaactgcagaaccagtcaggtcagggagcatgagtctgccccaggcatcaggtgtctgaacaccagaatctctgttcagactggtgaggccagtagtgtccctgtcccctcttatacagttggggacatggggttatgtaggggagagtaaatgccttgtctgggtctctgtgattctgccatatagttggaatcccttgtgaccttatgaactctttgtgaaccctgatcccttcttacatcctgggcaatgactctgggctgagaaccgcatatctgagacttaagagaggagatgtttgggagatttttttttcctattagagcaactcctggcaaagctatttcatattgtattttctttccatatttctatttcagttagcttgcatctgctggcctttctctcacatctcaaatagccaatatgttattttagggatgagtaatacatggccacgactgatcaatagaacttgagtcccctgcagccttcatgtggagctgagccgttgtgacaagcaggcaataatgatttgcacaggattccaggatcagtgtggacctgagtttctgggctgtttgtcttcctttttgaggcctcagtggacagacctctcaccgcactcccagacttctggcagagcccaggcaggctgttcttgggtttctttctttgctatcttgtctaccaaccaggatgtaattttgactttgaaaaggaaccacagtttgacgtttttagaaagagtagctgaggaacccgatctagagataaattcagaccccttgctttcctcagagcttcagttagtgatggctgaatgcgtgcgttcatctcgggaggtgttcacagtgatttaaattgcctggatgttgtaattcggtttctttctaatttatacttttgtgtagcagtcattcgataacattaacaatgaactgaattataactggtttgcagtacttttcttaagggaaatgtatttttattttattcctttattacaagtgtgttcctgtgtgtgtgtgtgtgtgtgtgagagagagagagagagagagagagagagagagagagagagaatgcacacatgtgcattggctttcagaagatgacttccaggagtctgttctgttctctcttctcttcgtggattccagggctgcaaacttgggtcattagactttcatggcaagtgcctttgcccactgagccatcttgcatgtcctaagataatttttagctaaagatagcaagtccattcactgctagaaatggcacagtcctgtgaccttcacagttctcttccacactgtttgtacctgcaggccctggcacacacgcttgcatttccttggaatagtcttcatttctcagttctacaagcactagacctccagacatgtcctgcctgtctcttgtgggtcctcatcggaaccactgtagagcagtctctgccttaatgtgagtggaatgcatagtttagtaggtaaagatgcagcctgtgactgttgcacgggtttccatcttggctacagttggagtatcacagcccatgcatacctggaagtcttaaggcattagcctccatggagttgagatgagctccctcttgaggacgcattttgaattgcaggaagagcctcatccacctttgtcttcagctaccagagccttctgcagtgttcaccagatgcctctgcctgatccatagcaggaggctcagggacattttgttatttgccaacagtgtggcagatttttctcctttaagtctattttgtatattgcacaggtagagtataaattctttcaaataggtaaaactaataaagattttcaaactcaacagggcctttttgctagaacaataaccagttgtatatgagcctacagcttttgtgtccaagggaaaaatgattttcctccttgttgaaatgaggaacgctcacaaagtggtctctagtttgcttggtgctcacagttactctcacatctaggaggtcagtgttagacttgatttggagcaataatgtcagggttggctcctcactgtctttatggctgtgattttgggaatagcatctggttgtgtgatgatatttccaggaagaaatgaatgataaggtcacctgctctgtgcgtgacataaatagaatctggaaaagtaggattatatcagtctgttttgtggtactataataaaataccagaggcttggtaactttatgaagaaaagatgtttattttggaatgtttctggttctagaggaggcatacatggtgataactttcttgctggcagaaccctgagatagcccaggatatcacatggtaaaagcatcctgagatagcccaggatatcacatggtaaaagcatcctgaggtagcccaggatatcacatggtaaaagcatcctgagatagcccaggatatcacgtggtaaaagccagggaaggtctgtgtatgtgctactgctctcttcatctcttagtaatgcagccagtatttagtcagggcatccctgttctgatgactttattaatcatagtttccccccccccccccaaaggactcatctgaaaactcacacttcaacctagagatccagcgtcagctcaggaaccctggggagggacagattctaaccatttcccacctctagcaaggctgtgcccatttatgtgttcactgaaatgtttggctgctattaatggaaataagcaccgtgaggggagtcccagcccctggtgagtctgctgcctgcagcctgcccactcactctttgcaaagctacatggggaggtagggcttctgcaaagacactggagactggatagccccaggagacagcacctgcacccaccagccctctgagacagagggaagtgtgcagcctagagacagagactctgcatctgcaggagatctgtgcagagcaggaaacccattccagctaaaactgatgtcctgtaccaagtgcaaacttaggaagataaagaagcacggttggctccctggacccgggcggatgtcccctcctctgcaggtaacgaaatgttccgaggttggaatggaaggagacagagatgggtagagaagagttgagtggtccaacagttagggactagcctaacagaagtgcagagccgtggcttcctctgtctgtctcaggcagcagtctttccttatagccagaggacaccagttgatgagtgaaaggacaccagaatctacactgtgcatagctttggactcagcagctgtatatcagtgagatattttacaggctggaaatgactgtatccatctgggtgtgtattgttacttaaagcaccacaagtgtctgtcggtaaccgaccctctgacttatgggagnnnnnnnnnnnnnnnnnnnngcagtgaagtcgtactcagccattcagaatgctggggtggctgggctgattgctccttcagtaaagtgcttactgtgcaagcgtgaggacctgagtatgatttccaccagcaagaagaaatgggcaacagtgcttttatacctgaaatactggcactggagactagggatccaaacacaagacaatccctggagatcactggccagctagtcctactcagtcagcaagctcccagttcagtgagagaccctgccttcaaaggtggttggagagtggttgaggaagatacctgcgattaacctctggcttccacatgcactcaggcaggtatataggtgttcccaccttcccactgaaacacaaacgctcacaattccaggctgtggatcagtaatgactgacagtatgttaagggtcagaagttggtttccaggcagcatgtgttttgtgtgcatttccatataactgcccactggggcccacttgttaattccatcagtgcttactcaatatctcacacactgggcacattttctgggcagtggacaagacagtgtgtgacattctgttactcacagtgctgtggttgctgtagcagcatttcctaggagctacgaagtaatgtggaataccagacttcatcccagacttgctacgttatcaggatttgacccactgacccacttacacatgattgttcttgctgctgttatgatttgagtgtgccatgtcctctctgggctcgtgggtttgaacacctggtcctcagctagcagtaatatttgggggtgctttgggacctgtctggcacagatgggggtttctaacctggtcctgcttttactttctggttggctgtcatgactccacctcatattctcagcagtatgaactgaaccatacctactaccctgccttcccttcctgatggactgaaagtctcctgaaactgtgagccagggtgagttcttccaccctcaagttgctcttgccagatttttggccacagcagcgagaagggtagctgataggaaatcatatttactaaatattcagatcacccttttgtcttagtttggattttactgctgtgaacagataccatgaccaacatttaattggaattggtttacaggttcagaggttcagtccattaccatcaaggcaggaatgtggctgcatccaggcaggcatggtgcaggaggaactgagagttcaacatcttcatctgaaggctgctagcagaatactggcttccaggcaactaggatggggtcttaaagtctatgtccacagtgacaacccttctccagcaaggacacaccctctaatagtgccacaccatggaccaagcatgcacatatcatcgcatcttccctgtgtggtggtgatcagtgatgaagttcacattctccttcatacgcttctccgtggttgaaatgtcacacagtgaggcccattctgatgtttacaagcaaagatgggaacatggcagaggagctatggctcctgcttctggatctttggcctgtcttggctttgtactagcaagatccttggaggcagcgagcacagaggcaaaggaggtgcaccctagatgactacagcttgggctggagtcgtagccaccacttgagcagtgtggtaggtctgcttgtctgaattcatggctgttctggcccaactgagtggtgactgaggcagggcctcattgtgtcacttgggctggcttcaaacttgctgttctcagtgctgccattgcaggtatgtgtcaccacactgggctcttagtccagctattgtgtttggtggccacctggagagacctgggccatcagctgtaggtgatgggcctatatcatcttctaagaggaggtagccccaagggctttctggcacattgagagtcataggcttgtggtctagtgaagagctgtctatcccaggcctggaacattctgacatgtgggagaagggctttctgttccttttttcttttgttttctgttgtatccgaaagctggaaagagacctgagccagatgtagtcctgtggcagccgcctgtgacatagtacagcataactgaaagaaactagacttggaagcaactgagtcaggctcaagacccaagttcacccaataagagctctctaactttgggcgggtgtgttgtcttattcgggcttcagtattcccatgtgtgagacttgctctggacgtacagagtggtgtcaccataccatttcctggtaccctgtagttcttacatgtctcccagagacctatgtctctgactcttgatccatctataacaatggcttctggaaaaaggggaaaaataaggacaactctgaatatgcaggtcaggtttgcacccactcttcaagatgaagagctgcttgctctgaggctggagactaccttcctgctgccaccactgccttagttgtggtaattgagcaggtgtcatttcagatgaatcagcctcagctgcgcatcacatcacccatcacagggaccacatctctgctcctctttgcttaatccttggttctgctggtccctgtttggccacaggctctgctgtgtgactattcctaatagggaataagctaatgtctgttcatgccaggcagtgagggcactagtgacagaacaaagatggtttcacccaaacctagctttgtgaccaatgggttcactgttgctacttaatatgggtgatcaaaaccttgcccactgcgtcatgggtgacagttcacatccgtagacctccttgcataacttccaggcagttctgctggagtctcctctctcatagcaagtgtttacttagctacataactaagaagtcttgtaaacatgtgaccttcttgagtctccaatacttagttgtctgagtctcctgaggctcgctcctccctctaaaggaaacagccacacagtagcttctgtcgggccttttgttgcagtgataagagaagcaggcattgtcagtgtctctagtcaagcttttaaatcaaccatctccgtcttataagactcctggtgagcaggttgtaccggtgacgaaactgagactcagcaatataaagaaatgtgtctaacatcactgaaatggagtctgagtttgagcccaggactctcttgagattatgctttgtgaggaactcacaaacaccactacagaaagtcggggctgaaactggactcacgctaggccttataccctgttgaccgtgagtcagctgccacctaaattggcatcataccgacagtgggaacatgcaggcaatttattgtctatttgtttcaaagaaatggccttttccttcttggagggatgtagttccggcctcgcagacaggagtctggagagatgttcagtgagactgctacctgcacttagccatagatctcatctcctgtctcctaatcgacacccagagcagacaggaccattagctagaaagagcatcaccccccagggctactgggcttagcaggaccgtaaatcaagtccaagttacaactgtttctgttcaaactgtttgtacagcaggtgtgcaaaataaatttctttagtgcaggagtctggcttctgttggaagaagtgacagcctttggcagagagacatgccattaggttgattgaggtcatggcttctggagtccacatgcctgggcctcccctcagtactcgattctctagctgtgtgaacttaagtgagcctctttatcctcaaagcatatccttgaaatggggatcgaagctgtacccatcataccccactccatcaggactccgcaagactctcccagggtcatcatttctctctgcataaggtcatcttcacgggccatggtttattacatcaaaagggtgcaatgcaaattgaatataggcaaaagatggtggcagtgctatcctgaggaggcccaagctttggctccccagaggtctctcttagagcacttctaccggatgcattcagttcatctggatttcagcagcgtggtgaagagctgccctccgggcaagctcatttcagacttagcacccagcttttgtccagggctgatcacctgcacaccgtctctgtcttagttacttccccgttgctgtgatataaagccctgacaaaagcaactaaaggaaggccttgtttggctcacagttgaaggtgctgctcccgagatagctgatcgcattgcatccgtggctggcaagcaaagatgattttcactgctcagctccttcttgcttgtatttgtcctgcaattagggggtatttcctacctaacctagatgttttgtcacaagacatgcccagaggcctgtctcctaggcgatgctagatcctgttaagttgacagtcactattaatgatcacaaccaccatctgcctcgtacgttcctagactccagactctaaggaaacaccaatgttagcacaaactaaactgaagaatttgtataagatctgttagaggtagagtgtccccaccctctccacaaaccacagtcccaaactccagccaagccagatatgaccttgcaagcaggtcttctggaagaggcagtcttgagagtgtcacgttagctttcctgcatgctatcccagcaagtggctgctgggtagattaaatgagaaaatctgtgcgaagtacttggcaccctgcctagtgtggcaaggactcactaaatgccaactgcagttgctctgatattccgtggatgcattttgaccagctgtctcttgtgagactatgccggggcctagcaaacacagaagtggatgctcacagtcagctattggatggatcacagggcccccaatggaggagctagagaaagtacccaaggagctaaagggatctgcaaccctataggtggaacaacaatatgaactaaccagtaccccggagctcttgactctagctgcatatgtatcaaaagatggcctagtcggccatcactggaaagagaggcccattggtcatgcaaactttatgtgcccagtacaggggaacgccagggccaaaaagtgggagtgggtgggtaggggagtgtgtgggagggtatgggggacttttgggatagcattggaaatgtaaatgaggaaaatacctaataaaaaatacttaaaaagaaaaaaaagaaaagaaaaaagaagaagcaagcaccatacccaccatccagctccataggtaccatccatctgctcacccattcacctaccccgtcccctgttttggacatgcagtgtttagcctgtcctagcctcttcaaggactttgtatgtgtatgtgatgtgatgtttatgtgtgtgtgcgtatcatgtacacttactagagtgtgggggtcagaggtcaaactcttcaggagccatctaccttgtttttgagccagggtcttttcctgggatctgggttttagcaagtaggctaggctgcctggccactgagccccaggaacccaccccccccatctgttcttctccagtgctggcattgtaggtcgtgcctccacacttcatatctttgcatagtttctggaggtcaaacacaggtccccttgcttgtgtggcattcattttactgacggagccatctctcaggtccctttaaggacttttgaagcagcatgcttggcaactcccttcctagagaaagctgtatgtaggtgtccatgctgcctgggcatttgtggagtgatggttacggttccgtgggaacttcatgccgagcctgcaaggactcactcatacattcagagcgagtggggtgaggaggctatggcctgagaacttcattccctgatggccctctgtgtttcttttctgcctgtagccaaagcaaaatcaaaatgtggcccgaccttcttcccctgcgccagtggcatccactgtatcatcggccgcttccgctgcaatggatttgaggactgtcccgacggcagcgacgaggagaactgcagtaagtctggggacgcagccatctctgcgttctcctttcagtacagccagatgctcgggcaccccctgctgttgtatcatctttagcacttctgggtgtgactgttaattctcagatattgtttgtggggggccacagtaagtccactgcatctaatcagcctggacagtccctctgtgggtgcaggtgagctgtccccactgaacagatgacgagcaagagttagagaggtatgttagcttcccagggccacatagctcttttatacctcgtctgattgactgtctcaacactcatatttttactcttgcttgcttcccttctttaaatgcttaagaactttgttttgttcattatattgtatcagaattggaaagatggttcaacagtgaagagaacttcctgcttttgcagaggaccaaggttcagttccccatatccacacaatatctcacagccattcctaactccagtcacaagggatgtgacatactcatctaaacttccaaggcaccgtgctcgcatgtggccatgtacatatatgtgggcaagacacttatatacaaagaaattgtaaagttaggtatacatctccattttgaaacattgttgttcattggacctaggtaataatcaccagggaaaactccagggtgagaatttggggtggagctttgaagtgactgacaggtcagactagagtcttcagctaccagtgggtctttctggacttgaatcatttttacctcatgccagttagaatacaggaagctgattctgtgggtctctttctcttacaaataactgccactcttcagtcattgacactcccgggagacagcatttgatttttgtttgaaattatcaactctaaaaggttccagagaagagacaatgcttttactcagagaggcatggctgcagcgactcttccctcatcctttttctcacgaacctctggtatcattctccttttgtctgaagaacttctttctgtgatgctttcttagaaattttattttaaagagtgtgtgtgagagagagagggagagagagcgagagaggggagggagagagagagaaggagagagagagggagagagagggagagtcagtctgtctgtctgtctctgtttgtgtgtttacacagatgcccatggaggccagaagaagtaatcaaatctggaataggagttacaggtgtctgtgagctgcctgtcgtgggtattgggactcaaactcaccttgtatgtaagagcagtatgtgcttgtaaccgctgagctttctgcagcctcagagatgctggtttgcagatgacacatgctctcagttttcactcagccaagtatgtctgtgtttcacccccattcctaaaggatttttatggcatgtggtatttgggggagacagtcctttttcctctgagcactttaaatgtgccacttttgtccagcttctctagtttccacagggaaagccagtcacttgatttgttcctctgtagatcctgcatctcttccctctggctgcttttaagagcattttgtgcttagttctcagcttttagatcttggtttcgggcatctgcaggtagtatgtttttaatcctctttagtgttttctgagtctaagttttgattgttgccctgcttcctacattttcagctatcatgttttcaaatgtcttccagtgctgccctctttccttctgagattcgggtgacaggagtgtcaggtttctagcctctgtcctgccagtctcggaggctcagtcatctcgccccttgttgtccagagggcatacttcctattaatctgtcttcagactgctggttcttcctttgtcagtgctaatctgtttttcccacacgccaactgctgtgctttgctttgttttaatgtgttattataatttttatttctaaaattttctcttttttttgcctcctgtttgttttgcttagactgtttttccccttttttccagtatgcccgtgaccccctgttgagtgtaagcgctgtgtttccagtgtgtctgtgatcccctgttagagtgtaagtgatgtgccccatttttgtctcacggttcccatacctgtgtttctttatgttagtatccatctggttgttgtcttttcccacatgggttgagattttcctgtctttctctatgacaactaattttagtttctgttctggcatattgtttgttttgtctaacacaagcatcttaagtaaattctagacagaatacttgcatgtttgccttcgtagacaaatgacctgataggcatttccctagttattggttctgggctgtgctgcttgaagttggactgtgcacttcccagtgggctgagttcattctcatcctttctggtgtccatggccatccttgatgaagacaggtgcacgcatgtgcagtgtgggcatccatgatgagggcaggtgcacacatgtgcagtgtgggcatccatgatgagggcaggtgcacacatgtgcagtgtgggcatccttgatgaagacaggtgcacacatgtgcagtgtgggcatccttgatgagggcaggtgcgcacatgtgcagtgtgggcatccttgatgagggcaggtgcgcacatgtgcagtgtgggcatccatgatgagggcaggtgcacacatgtgcagtgtgggcatccatgatgagggcaggtgcacacatgtgcagtgtgggcatccatgacgagggcaggtgcacacatgtgcagtgtgggcatccatgatgagggcaggtgcacacatgtgcagtgtgggcatccttgatgaagacaggtgcacacatgtgcagtgtgggcatccatgatgagggcaggtgcacacatgtgcagtgtgggcatccttgatgagggcaggtgcacacatgtgcagtgtgggcatccatgatcaggacaggtgcacacatgtgcagtgtgggcatccatgatgagggcaggtgcacacatgtgcagtgtgggtatccatgatcaggacaggtgcacatatgtgcagtgtgggcatccatgatgagggcaggtgcacacatgtgcagtgtgggcatccatgatgagggcaggtgcacacatgtgcagtgtgggcatccatgaggagggcaggtgcacatatgtgcagtgtgggcatccatgatcaggacaggtgcacacatgtgcagtgtgggcatccatgatgagggcaggtgcacatatgtgcagtgtgggcatccatgatgagggcaggtgcacacatgtgcagtgtgggcatccatgatgagggcaggtgcacacatgtgcagtgtgggcatccatgatgaggacaggtgcacatatgtgcagtgtgggcatccatgacgagggaaggtgcacatatgtgcagtgtgggcatccatgatcaggacaggtgcacacatgtgcagtgtgggcatccatgacgagggcaggtgcacacatgtgcagtgtgggcatccatgatcaggacaggtgcgcatatgtgcagtgtgggcatccatgacgagagaaggtgcacatatgtgcagtgtgggcatccatgatcaggacaggtgcacatatgtgcagtgtgggcatccatgatcaggacaggtgcacacatgtgcagtgtgggatccacctaagaagagtggtgctcattcctctacttctgtctctttaatgtgctaggggcttctttccagtgtcctaagaatcctaaaaggcaaaggaaaattgaatactcactaccattttgttaatagtttaaattctgatcttctttcccagtgggtatgttcaaattacttttcagagtgttaaaagtagctgctacatatgtcccagccaatgttgtaaagctgccttggtggaagagccagcacaatgtgtggttcctgctgcctgttgtacctgctcgggtacctcccatagaggaaattaagcagcatcaatagagagcccctgcccggggtggggctggagagatggctcagcaagagctttttctccttttgcaaaagacccaggttcggttctcagaaccctcatgggggctcgctaccttttgtaactccagttccaggagatctgatgnnnnnnnnnnnnnnnnnnnntttagtttctgttctggcatattgtttgttttgtctgacacaagcatcttaagtaaattctggacagaatacttgcatgtttgccttcgtagacaaatgacctgataggcatttccctagttattggttctgggctgtgctgcttgaagttggactgtgcacttcccagtgggctgagttcattctcatcctttctggtgtccatggccatccttgatgaagacaggtgcacacatgtgcagtgtgggcatccatgatgagggcaggtgcacacatgtgctgtgtgggcatccatgatcaggacaggtgcacacatgtgcagtgtgggcatccatgatgagggcaggtgcacacatgtgcagtgtgggcatccatgatgagggcaggtgcacacatgtgcagtgtgggcatccatgacgagagaaggtgcacatatgtgcagtgtgggcatccatgatcaggacaggtgcacatatgtgcagtgtgggcatccatgacgagggcaggtgcacatatgtgcagtgtgggcatccatgatcaggacaggtgcacacatgtgcagtgtgggatccacctaagaagagtggtgctcattcctctacttctgtctctttaacgtgctaggggcttctttccagtgtcctaagaatcctaaaaggcaaaggaaaattgaatactcactaccattttgttaatagtttaaattctgatcttctttcccagtgggtatgttcaaattacttttcagagtgttaaaagtagctgctacatatgtcccagccaacgttgtaaagctgccttggtggaagagccagcacaatgtgtggttcctgctgcctgttgtacctgctcgggtacctcccatagaggaaattaagcagcatcaatagagagcccccgcccggggtggggctggagagatggctcagcaagagatttttctccttttgcaaaagacccaggttcggttctcagaaccctcatgggggctcgctaccttttgtaactccagttccaggagatctgatgctctcttctggcttctgcaggccccaggcaaacatgtggtacacatacataacccataacattatacagaggcaaatttccagatctagaatgtgggaaaatcctcagaatcctggttcatccataagtaattctatggttaaaacatggaggaaggcggcggggtggggggggagggggatataaactgaaagagattgcagagataagttaacccagggccatgtatagactgttgtctttttttccctaaaccatttttttctgactctaaaccattctttaaaaaaactaattactatcttaaattgtgatgtgacgttttgatgatatcaaggcataactgctggtttgtaaggcctgagaatagtggtgatttttttttttgtccatttattttagcagcacttagtatcgtttataaagattagattaaatgatatctgtgcttggcttctactgctgctttcaggtgtcctggactatatttgtaccacagttgacagcctcctgcttgtctcccagtgaggcaggacgtgttagccaggctgtatgtgtgatcatagagcctgtcagagccctgcagagccggctagttttctcctgtctgtctccatccttttgtctcctcagacagcccatgagcaaacctggaggacccagaccttttctatatatagactgtgggagctgagagttacagtgggagtgcttccccagggtgcccaagagatatccttgagactccttaaagactcccacggaacctactttcctgaatatgtacctggcttgtcaagactgtgctggtctctgtcccattttgtccttggccgccttcaaagagctcatgaacagaagggccagccctgagtgtcccctgacaacccgctcctccctgcacccacacgtccactgcttcactcttctccgtgttcagtgtggcttcctctgtttgctgtgacagtcatgagaggacatggtatcatgtggcccatagctgttcacccagggccaaataccttgtcactctcagccttagcgcgtattaaacaagacttctcaggcttcatgcacagttgatttggtatccacctagtgttagctctttctggcgatggactcagtggcagtttgttctcagtgcctaccagagtgaccgaatcaaataaccagtcaaagagataaatagggaagacaggaaaacttggacagcagtccttcccactgccattagaataaactcttaacataccatggcttcttcatcctcctgggttttcacatatgcttgcagggtagacacgagttgtgcctggcacattagctccaggtcctaccgttttgtcagattctcatcctctgtttttagttacgatgccagacagcattgaggggctgccttgggtgtggagatctcagctggcatccttgacccaggggggaatgagacttcatacaaatatcaacactgtagcactggtacaaggagtgctgtgggagtcagggatggagaaaccactccctcagggctcttcaaggaggttgttgggaaaggtgaaccacagagggcgggtactacttaaaatacagtcccatgggacatctcagggtgagagccgaaagccatactaggccagttccagggcatatgaaccggttttgcacagagtttgtgagctgtatctggcatctctacagcaaggccctgctttacatgggggctctcatgggtgaaatggagacatggcaaggttcagtaacttgtcatggttacataattgacaggtggcaaagttgaaatattaactcaggtgttataaatgccagggtgaactccactactaccgcagtatctcccatcagcaattattacaacaggcatatgttaaacactccctgtgtgtcacaggctggtctccgtcctctgcagctttggctcatttagtcttcacaaaaatggaacacaggcattgtctctgtcctcatgctgtagataaggaaatccagagttagagaagttaaacagctctctcagcgccatatggcgagtgagtgaatgagctgagatttgagcccagggacacttcagaccccactcttagcccctgcagtaagatggctggctggatttgtgggctgggcagataatggagaatcaagatccccctttaaaaaaaaataataagtccaggtaggagcagcaggtcctgagcctgtgaagggtagggagatagaagggtcatccaggccaaatgcctagggagctggaacttggcatctttaacggaagtagccatcacagaatggggaagaacttgggatgaagaaggttgtcactattaggtgtactgtttgaggtgaggaaagattcaaggagaaggctacatgaggcattgagagaaagatatttattaccagaagggagttaggggaaccatccataaaaaaagtgaaggttgaagtcgaggaattgcctttgagcactggatgggaggcaccgatgtgtaagaaatctttacgaagcagaaggaaacagcctatctgtagtcatatacctgcatcctgccagcgaccacactgcctctggggagggagcattaagaccccaaatgtgtggtggggggaaggcaggggaggtggagcactctttaccccttccttgtttgtctggattacggcccttcctcctgcagcgtcttttgcagaatatgggtgtacatagtcttggagcatggggatgaggactgctgagccgaagcctgatagtctgggtgctggacaggccctgttagcagatggacaggaacataaaagcttatagttattggcagacaagccccaagcaaagcagtgagcatattccaagctacagagggagccctgcatgaggctggagggagccatgtgacacagaagatgttttagcatctcttgtttttagagaccatagaccccatccaagacattagcttgccccacttatcccaaccataaacttcacaaggaaattggaactgcggagggaagggtctccacagtggccataaggctcagaattgagtagtaatcaccttatgatgggagctgatgaccgattacacgttttaaagtgaagcagcttcatatgagttagaggacactactaagtcctacttgctggagacagatgcttcagttcctgtgttgaagccggtcagttgcttttggatgactgcaggttcctgtgatccactctgtccaatatggctaaatgggcagccagtttatttagctgcctccctgaacctattcccctccctgcctttttcctgtgtactgtgggctaggaagcagatcatcagagtcccagcgttttttggtgacaattcccaaggaacttctgagccggcgattctgtctgttaagttgatgccgcatttttttttttttcatctcctgtgaaatagatactacagggtactctgttcctctctgtagttaactgagtaaagtcccacactgttcaatggctagtaagccttagcgaggatgaagacagcataaacatttggggtacattaagtattgctcaaagataccgcaacataacatcctgtaggacatactgtctcctgctccatctgtgagctagcagttcagaatttgtgccaagcacagtaatagctgcagaggcctcaaagacacgtaagaaaacttgagtttccggagctttgggggagatcagcctccctggtgagcgagtctgcctagagactgcacattgatggcttggggacctcactggcaggcattttctccgagatcgtgctgcatctcagctttgtcaccatttatcctttctgatggaagcccagggtcattctaaaagaacacttttttttaaaagctgagctatgcagtgggattgcctttgctttctacttttgtaactttctgatctcttttataactgtttttctccatctgggattcttgaagtagcttttaaattttatttttcttttctgtctcctcttgtatttgttggttttcttgctggcttgttagtttgtctgccgggtggcaaacacgctctggctcactttgctctgtccttgggagctggcaggcagggcttgtcggggcctgtgttaagggagacacagaagacactgggggcggaagcctgagcgtgcttctcagcttcccagcattttctaggcacaaatgtagccacaagcgcttcagcttgcttgcggctagctttggggagtcttttcactgtcttttccctctgtctctctgccctgtgtgggagtgggctcaagtgttagaaccccagtggacagacagagggaagaaccctcacatcagtttatttattttccagctgttgacattttatgggtcactgtttgtgtttgtaaataaagttttattagaagacaactatgtcctttgttaatcaagtatcagtacaatagccaagtcattataatacagatgaaaatcaaaatggctggcaaaatctccattatgtaactaagtggctctttataggaatacctgacccaggctgttcagtattacattgttaaaactctctctgatttgaccatttgggtcagttcttcattccccctccctctattttggcttcagcattcattttttgtttgtttataggtctcttttgagcaggaggtggattacttattaataaactgatttccaaggtaggcctactgattgcttccccttcagagtccaggagaaaacctccctctgcatcttcatcaacaacctctactgtggagctccagcctgatgcctcgctgtgcatcgctcgtgaggctgactgtgtagcagcctcttttatgggaaacgcttctgaatcctttgccaggttttctgccttgctgacttttactttttggttgtcagagttagttctttatatattctggctgctgggcttgttggttgtattcattaaaatcaacctgtgtcgtattttcaagcacacacatacacagatctatatgcaggtaaacagtcccacacgagacttggactatttttccttgggacagtttgaaagcctctgagtcagaaggtaaagtagagaatgacaccctggtgtgtctcactcagatgctgacatgaccttgccccgccccttcatccttggccccttcttcctgcccttccaggctatttcagtgagttggtcggtcctgatgctctggatgcccagacccactggagtgcagggaccccaaggcgcctgtgctggatgcttatgagcagaaagctgggtttgaagtgttgccatggacgaaaatcaaatgtgatttgtggttttggatttccacttgggttttggctgaggctagaccttggttccagtttgattaagctaagcctttctctggcctagggtgatttaaattaacccttactttatcaggccagatagctgttggtcctttatcttttaaatcagctctagcttgtccagtcttgctagttcctctgatctttcaaattaaactttccaccttgaatgaaaaggaaaaaaaaccatcatcttcaggtttgtataactggaaattgaccaagtcctcacaactataatgtccaggtatgtcaatggagctcaagaaggagtggagtagacaaatttcagctcacactgtacagtttggagaccgtggagacattgggtctgacttggctttatctgtgcagagcctctgggctaggcctaatatccacttgggtacattcttccatacgcaatgtaggtgcaggcacagttcctcactggaggtccatgacagcccatttcatcctcactacagtccttccatttcttgggcacacaatctgggagaccaggacaggcatagctaggagatgacacagctagtgaacagacatgaataatctcacagaagatcagtacttgtatggaagtctgcctcatttccccatcccttgcagggaagtgaggacaagacagggccctgtttgcagtcactgaagtggctctgtggaaatgccttgagctgctgtgtgtggtagcttacacctttagtcagagtagtctctgcatcatgtcagactcagcatgagagctggcacagtgaccgagtgtcagggttgggattggtgactgtttttaggtaaggtctcactatagacctgcttgccttgaactctgagatccacctgcctctttccactggagtactaggattggaggtgtgagccaccatacccagcttctcgaggacatttccactcatccacttcattgattggaaacaaactatactgtataaatgccgtttccttggggatattgctctgtgctctttaccagttctgggtctgcctcatactgtgcagttggcacccatttcctgaaggacagaacccaggaccacaatttcctttacgttcctcaaggactgtgacaagctgccccatgaagatgctgctcaagagagtccctgtgtaaattcagggtctgcttggtagcaaggaagaaatgaagacaaccagtatcctagtgggcctggaagaatgaggagtctttgctctgtagagaaggcatcagaggggctggggtggctgtgtagttataaagtgctttccacatgagcgtggggacctgagttcacatccgtagcatccattacctgggtgtatggatgctgatctgtaatctcagccccatgggctggggctgagataggaagaactcctgaacttgccgcctcacccatctcactaattgataagcttcagtcccagtaagagaccaggcctcaaaaataaggtggaaagtaactaacagggacacctgatgttgatctctagatttcacccacatgcattgacccccacacgcatatacgtagaagcacacatacataataaagacagacacacatacacacatgtatgtactcacgtacgtgcacacacatatactcaacactgttctttaaaaaccagaaggagagagaaggtgggagaagcgttcatcattcagaagcacttgtcgttcatgcgtctcatcacctggtcccgtcatgcgtcccatcacctggtcccgtcatgcgtcccatcacctggtcccgtcatgcgtcccatcacctggtcccgtcatgcgtcccatcacctggtcccgtcatgcgtctcatcacctggtcccgtcatgtgtctcatcatcacctggtcccgtcatgcgtctcatcatcacctggtcccatcatgcgtctcatcacctggtcccgtccctggaggcagaaggtctccagcccagctgctgtttctgggtctgggtgttctcgtgtgtctcccatcaccagccatctccatagtgcacaagtaaagtctgtgagcttcaagctctgccacagactcaacaaaagctactggggagcctaaggttaactgctcagaatgaggctttgacctttggctttaccggtgtggtcacaggacaccataacaatgcccgggagaagggtttagaaggagacaggataaagcttatcggtccaggtcatgggctggccaggctctgggttgaatgagctatgactctgaccctacaacctgaccatgctgtttctctcactagaaaggctcctgggtactcatagggatatgctgggctcccttgtgacccactgttctctcttcacagcagcgaaccccctgctttgctccacggctcgctaccactgcaggaacggcctgtgcatcgacaagagcttcatctgcgatggtcagaataactgtcaagacaacagtgacgaggagagctgcgagagttctctaggtaggtgggctaccctcccccgagagacacaaaacaagcaacaacaacaacaaaagcgattcagacaacacggacagagcacacacctcctcctctaaacagcagccgcagtatttgtgtgcttgtcttcatcctgggggatgaagcatgtgcctaccattttgactttgcgatactccacatgttgaaccacacctgtacagttctcctgtgctcatcctctgttgcattacccactcctgcgttgcactgctgtggttttctaagttgttctgttgttgggagtcatgtgagctgctcccctccttaggatgagatctgctgaacgagaagcctgcgtgggtcgtgaccaaatttccccacacagctggctgaatcttttttgtttggtttcactgctgtgcctggcagttctaccctgacagctcagtcgccgtcacagctgctctgggttgtgcttctcttgttctcatttttctaacttagtagtcatgaaatgctagcctctccatatgctgtcattgctgtctgattatgaggagcacggacacccccaggccccctgagtttgtttacttcttggttccctcttgtgtgaattgcctgtgcatataaaagctcttgatttgggagttattttgtggaaactgaaggctgcagctgcagggtggaagaggaaggacactgagggatgggggccctccttcctgtcagaagacacaggctcctgttcagtaaacatgcctccctccctcccgccggcccacccgcccgccctctctatgtatccaagaatgaccttgaacttgtaattcttctgccccactttcccactgctgggattataagcataagccccatgcctggttttactaggtgtagggaggaaaccctgggcttcacacatgctaagtgaatagtgactatctgccaaccgagccacactccactcccaacatggatcccttcagtgattacagtgaagttaaaaaagatctaaaccttctattttaaggcattcagaaaagcatgtatttctaatgttacaagttggttttatttgcatatgatctccacttcttatccttcatagtgttatgactacaatttacccatattattgcttgttggtagagttcctttgtcttctagtgttctactgaatggttggtcatgtttgtagatttaataaagtctcaagtcaagcaagaggcttaactggttgcagtgtgttttgaggtggaagtaggtagggggaagtttcagggcacatacaggttattttcaaggtcctggctcttacttcgttgctgttcattatgtcattacaaatgcacgagtgaatgagcaaatggaccatattcacatcaccagtgggatgtggaccaagcaggaactatgacctctaacgtctgtgtgccgagggccgtaggagaggtaaatgtgtgtcagagcaggctttgccagaatctgcagggagggctgagagaggcgaggagtgggtgaattggaggatgctgttttggaaaacttccttcctgtctgttttcttcatcggtgctacaataagaatagcttttcagccagctgcagcagccactgccatgtacggaggctcttgtactacaggtgctggggcctctgctgcagaccaagagagtcacctagtgtggttgggtccagcactgcattctaatgtcatgctggtgggttctaatgcacaagtctgagagcaactgctctaacctagcgctagccttagagtttgatctcgctattaagttaggaaaatttaaacttctgtgtatggctctcctttacaaaggtcgagtttttataaaggaaaacatgctgaggaagacccagtgtgggctgccaatggggaatgacagtcgcagagttgagaactgtctgtacaggagtttcctggggcatttttgctgaccgggttgttgtttgtcctttggaggaatggctggtccctctgtaggctggctgaagttagtgcttttaaattctgctccccccaccccctgttctgagtttaccaatactaagattttgaaatagttggtggtggatgaaggcttttcttctgccctctggacattattattgtagtcgaggctcatctggattgttagtccacctgatggatccgatcccttagggactgtgcaccaaagcaaacctttctctcttacgtagctttggtcagggccttttgtcacagcagaggaaaagtagctgagataccctgtctcccccaggccatgtgtgaaagcattcagtatcaaattaaagactttgagccctgtagatgcaattagttctccccctcccaaaaggaaatgaagaagaaagaagaaagttttggtgatagacacaagccatctcccctgcactctgagctttctaagtcactacccaattgacatcagggaatgagtgacacctccatgtgtggtgaccattgtgttaggaatctttcctagctaccannnnnnnnnnnnnnnnnnnntgtgtcctatttgcttttctagtcccagagtccaacctagtggccctctgcctcacccataatgggctctgtaagtgttagcaaatgggaaaaatctgttatgtttaacttgcactctgtggtaccacatcatgtctttgtttcagtatgtgtgtgaaactagccacagtttatgaaagcaacaagaagtactgttctgtgtccaataaaggaagtttctgcctttccgactatggggatgtgtcccaaagtaagtacaagatgagagtcttggatatgagttcccttggccagcctgtgtttctgcatccctcctaggttctctccctgctcaaatgagcctggattactcaagagtgcactttgtgtgctctaaatgtgaactaccagggctccatacagtgtctccctgaagcatctcagagacttcttgactgcacataatgcacactcatgccttatggtatcatcattggttacaatgctctgggaagtcggctcagttgactctgtgtcctgaaacatcagttgatgtgggaaaaaaatatattttacattgtttatttagaagaaatgaataaatatgacttcaaggtaagaacatgggttgttcaaaatgcttttctcctcctctgagtaggttgaagccagcctccatcccatcatggatcctctgtgaggagctggagccagggtggccatcagagtgcattgcagtgactttgtggtggggtcaggttttgtcagggcttcattgattgacagcatagtctgctgtaggtcctttcagagggtacctttgggcagcatcactgtgactgtcctatgcttgggatctaggatactgtgtatcttagatacagcagcagctgctatgcagatgatgggcgtgaacatcattcaggtgaccttgaaaattctacctgaatgtggctttggtgtctagtgatgacaccttctgacacttgtgcctgtgtgtaatcccacctctttgtctgtgatctggatggtttgactagtccctccctccctcctgtctagaaaaatgcataaaattgactatcttaacttttgaaagtactttttaaagttcagtggcagaaattactctttccattatgcagccaattgctagaactttcacatcttgaaattctgaatgcacttaagaaacaaagaaaaaaagtgttccctctctgctccaccccataaccctggtaactgcttttccactttctatcttggttgctttggaggttttggggacttgtagaggagaatcaaatatcgtgactttattgtaagatgcttagttcaacttagcatgtcatcaagttcatctattttataacatgtaggcaatttccttcctgtgaaagactgaataatattccattttattgttgatatatcacgtttgatttctctgtcagcaaacacgtttggcccctcccccctttgactattgtgaatactgctgtgtgagaacatatgtacaaattatgacctggttttaagcaaaagaaattcagcaaacaggttgggtgtcatttctaggaacaggccatgaatagatagcccttccctctcactctgtgttgcttgctctgacaaaagccactttccatgttgtgagttgcagtgttgcagagactgctgggacagggagccgaggaaggactctgacgtaaagccaggaaggaattgaggcccaccagcggcctcaggtgaggctggaggggagagcctcctctcaaggaggctccagtggtttcgtattctagtcccaggtcatggtgaccagtcagggctttgggagggaccataaggactttatagggagagaacattctggggttcaagcttggtgtcagggacctttgtcccattcacgtggttctgctctgttctaacccctcccccttcaccccaggaccttgtgctcttctggcccactttctcgatgaagaactaaagactacttagaccaagtgcatactgcaagtgagtagggagctaaggtgtgaacttgagttgaggcagtgctccttctcctgaccctgcccacaccaccctgtccgcctctgccctctggtactctggaactccaggaagcagtctagcccgagctgcagagagctaaatggaagggggaactgtgatccaggggaagggcacggtcctcctcttggctctcacatgtatgcttcctcaaggatagtaccacactgatgagctggctctccacccctcgagcattttcgaagtgtgttctgccagtgagtcaccctagcagggagttggttggcagtgttgcgcctgccagagcagcttcctttccttgctgtgctctggcgataagacttcaggagaatggcaggctgtgagagctttggcaccttaccagagccagaaatgatgctttgtgctgtttcttttgcaggtctgtgtgtgtgtgtgtgtgtgtgtgtgtgtgtgtgtgtgtgtgtgtgtgtgtgtgtgtgtgcgtgcgtgcgtgcgcgcgtgcacgcacgagcctgtgtgcgtgtcagggagggacagagagagttggaacttagaaattacatactaggatcttgctctctttttgagttacatttttttctcctcaaaattcatttctcacaatctggaccctgcctccaggtccacagaacatgtccatatttaagagcagggtccttgacgatataattagtaggaagaggtcccattaggatagggtgggccgctgatgtgaccgtgtctttattgtagtgggatttggggtctcagaaacacacactcagggagaacattgtatgacataaaaacagaagaggaggatgcctgcagcacagatggccaagaaaccacagatggccagggagggatgtggaaccgactgtcctcacagccctcagaggaaagccctcggccagcaccttaatcttggacttatggtctcccacattgtgagacaatagatttttactgatgaacaccccaccccacaagtcggccttaccataacaaactgatataccattaccataagtcctacccaaccaacttcttcagcccccaagaaatgacccctaattaaagcatagccacaccttctgtgggacaccagatgtggtgacagaaatgtgaaggtctggagagtcatcagacaggccaagtgacatgaccctgaggagacgggaggtcctggggctgctgagaaaagctctctggggagagcactggtcttgcctctgtgtgggggtggtagactatgctgagcttgagggacgcctctcatcttgtatttcaagggtctcgttttctatatccgtgctccccttagctccaggcttcttagctcagtcccaagtggctctgtataaagtcacccaccccctttcagacccctgggaccttgcacttgtttcttagccctctctaggcctcctctagttctcttctgctcctgtgataagcacaacgcaaaggaagaaagggtttatttcatcttacatctgcaggtccatctttgagggaagtcagggcaggatcctgaagtagaaaccattggcttgttctcatggttcaccctaagagctgtcatttggctaatggtgaaatttagagcttggtatttgtcccatgggccacctccactgtccaccatgtggtagactgaattatcattctcagttctttgctctttaagagcctttttactgttagcagaatggccaaagaaaatgcctctgttaatgtcctctgcttactttggccagtggaacattgggtgacatagagagacccaaggcagttggcgtgcttgctaaggtgtggggtcccttgcattggaatgttgcccagattattaaaacccccaaagggagaacacagagcaagtggtttttcgggcctgaggccaggcagagactcacagtagtggaagcctggcaaaggctgctcactgcatggcgacaggaaagagaaggatgacagaagggaagagtttaggtatatctttcacaagctaagcttgcttctgttggcacactttctccagttaaccccgtactgcaccccgatcctcacctgcacccccatcttcccctgcaccctccccccagtttctttgttcaatctggataggtcagagttcctatgatctaaccatctctaaaaatgccctcacaaacatgctcgggtgtgtgctgtgggaactctctcactgtcccttatccagtcagcttcaccatcacatgaaggggctaacggtgagaagagttgggccagtgttttcagggaggaagtcaagccataatcactgagacagcgaaaagctggacgagagcatcaaaggcggcgagtaggctgtgcgggccacgaagggctatcagtcgggcggggtggggcggggtgggggtggaggctctgtgagtaactggccaggtgtgcttggtctctgtatgacctcaagcctctcaccagcctgcatcattgagaacaaaagacacactttgggggaagacctttgctgcttgtcaccaaacagatccaagctaccaaggcactaaggataattcctacggatgctgtgaggggcttggggtgggagaggtgctcatgctagcctagtgcttgcaagcagggatgacaaagagctttctatgaaggaaaggtttgctagaaataacccagactgtcaccgcagctggcgtttgatgggtggatattatttatcctaagacttgttgctgtcctgtgatgtcaagaacttcctttgagggctcctaaggaaaaagtcatcctcttaaagaattcatttagctttagttagaataaaactgccagaggtccatttagcaggaggaataaggaagctcttttttttttttttttttttttaaatctttggtgcttttaatttaagaatttgaaatcccagctgggctgggaaagacagaaaatgctgacttcattggaagaaacagaaggaggctggagcggctgattgccgactttctgtacccatgggcttttcttcctggtaattgagtgtttgcatccgaagtgtccttccctttaaccactgcagcaggagtttgaagatttctgtaacagccctcatttagaagcaaatcagacagattctacactcatggcagtaattgcttcctggtctcttaccccacggtgataatctgctgagctgctgctgtagtctctccactacttgcctttcttgcacaaggtctggcctctccccctctcctggtccctggggaatgggagaggctagcctagacacttgcagagtgtgcctcacttgagcagacggaccaggtttcagagcagtggggttacgtgtgcagctgactgtctgctttgcaggttctcacagcccagggcagccggactgaggatgtaaggggcgtggcttcatctgcagactgacaatgagcctcatcttcctgactccatcaacactctcttctctgtcgatcctttctagcactcattcctatgtgcgttcttcatattgtctgagactgaccagcccctcccagccctggaagagattcaaagccagatcagatcaaagttgctcacagttttacaagcgagaaatataacccactcttgataattactctaaagtgtgataaatgttgtactagaggaatgaactggcccctgggaaagcagggggcaggcataggatggcaggatttcctggtggggtatggcaatgattctgagaaatggaatcgctgcccagtcagttagggtaaataaaagtgggcacagatacacatacacgtgttgggggtgggcctctgaccaaagggaagagtgtattcaaagacacagcttgtggggctgaggagatggctcagtgggttagagtgcttggtcttcaagcatgaagacccaagtttgaatcccagcactcacataaaaaaaaacttggtatggctgacagtaggcagtctaccttcatcagggaccccaaggtgctccaacaggtcctatttcccagacctcagacctgaaggaagaacagggaaaccagataggccagtttattttgaaggagatgaccaagaggaggcacacagaacccttagtaacctgcactacacccaaactgcagaggagaccagaaaagctttctttcctcatagtgcccagtccaaagtcaggaatttatattaaaggggaaaaggcagaacactggaagttaattaatcccaaaatctgctacacatccttttaacttgaaccaatagtccaaagattatttggggaaacagcgtgtccacagactcgggtgaagtgtcgctgctttgcctggcatcagtccatactgccgagagcccgcacagatgtgcctttcctgtgccggctcccacaagccacctgggccagccctggagcgcaccgccataccaacaggttatactcctgacagtgcttcacacaccctgcgacggctgcctctttcagccaacccagctgtcaagctggaggtgtttcccatatttgtttcttccttcataagctaatttgctctaaagccatcgtgacccttggagaagccatgcttttatcttgattttggagtgggaccaaggttttagttaatcttcagatggcagaaacctgacgctggttgtgcctttttttcccccctttcttttgcacagaggtcagctggctcccaatttaggtcaatttgcatgtgaaggaaatctccaaggacagatactttgtcctcattagctgatctgtcaggcagcgcttcccaggtggctcagaaccttttatagattttccctcaatatccctctggcgtggcagtgcctgcctgcttcccttgaggaccctgttgtggtttgggaggaaatggctggggtacgttgcccttcccactatgagccctgcaccccatcaatggtccctttactccggtctttatgccagcctctgcctggcagccttaaagtatgttcacaaatcctttgggacctccttccttgggggttggggctgtgtccactctcccagaaactggttcaacctttgtgtctgtttgctcagcaaaatgtgtcacactgatacttcatgacacccacttataggatacaaaatgccacagggctttttgtctggaatgtgctttcattaggcttcagttatcgaatatatatggtagacaaggttccatactgtaaggaagcctgtcttagctagagttttaatggctgtaaagagacaccattaccacagcaactcttgtaaaagaaaacacttaatttagggcttgcttacaatttcagaggtttcgtccattctcatcatggtgggaaacatggcattgtgcaggcagacacagtgctggaaaaggagctgagagttctacatcttgatccaaaggcatccgatcatgtaccacactgggcatagcttgaacatag

SEQ ID NO: 3331 - DNA, 589 bp, Mus musculus
caacgtcgctgggcagcggagcggcggccgcgccatgtggctgctggggccgctgtgcctgctgctgagcagcactgcgggtaacttcatgtgcagcaacgggcggtgcatcccgggcgcctggcagtgtgacgggctgcctgactgcttcgacaagagtgacgagaaggaatgccagagccagctgctccctgggaacaacttcaccaacgagtgcaacatcccaggtaacttcatgtgcagcaacgggcggtgcatcccgggcgcctggcagtgtgacgggctgcctgactgcttcgacaagagtgacgagaaggaatgccccaaagcaaaatcaaaatgtggcccgaccttcttcccctgcgccagtggcatccactgtatcatcggccgcttccgctgcaatggatttgaggactgtcccgacggcagcgacgaggagaactgcacagcgaaccccctgctttgctccacggctcgctaccactgcaggaacggcctgtgcatcgacaagagcttcatctgcgatggtcagaataactgtcaagacaacagtgacgaggagagctgcgagagttctctaggtagg

SEQ ID NO: 3332 - protein, 196 aa, Mus musculus
NVAGQRSGGRAMWLLGPLCLLLSSTAGNFMCSNGRCIPGAWQCDGLPDCFDKSDEKECQSQLLPGNNFTNECNIPGNFMCSNGRCIPGAWQCDGLPDCFDKSDEKECPKAKSKCGPTFFPCASGIHCIIGRFRCNGFEDCPDGSDEENCTANPLLCSTARYHCRNGLCIDKSFICDGQNNCQDNSDEESCESSLGR

SEQ ID NO: 3333 - DNA, 304083 bp, Homo sapiens
  misc_feature (1)...(304083): n = A, C, G, or T/U
gatacagattcttcttctgaaaatgagaaaaataataggtgctaccttggcctcccaaagtgctgggattacagttctaatgatggacagcagtgtagggttgaagtaggaggtgggactcaactccagaggcggggctcggacaccaaccagactggggactcgctaaaacagggccgaggtgggagcagctttccaatgagacacactcaccagtgtgccatgtcagtttaccactgctatggaaacacccaggagtgattgcccctttctgtggtaatgacccgatgacccaaaagctactactccttccctagaaatgtctgcataaatcgccccttaatctgcgtgttattatgtgggtgagtataaatgtgatgcaaaactgctctgagttgctactctcggcctacagggcagccctgttctgcaggagcagtcacggagcagtaacaccaccagtgctgtaacactgctgcctcaataaagctcttttcttctacccctggcttgcccttgaattctttcctgggcaaaatcaagaacccccgagggctaagccccactttggggctcgcctgccctgcatcagggtgaccatagttaacaacaatgatatatttcaaggtagctagaagagaggacttgaactgttcccagcacatagaaatgatagatacacaaggtgatacatatgccaataaccctaacttcatcattacacattccatgcatgtaataaaatatcacatgtaccccacacatatataaaatattatgtatcaatgtaaaaaagtagcatgcatgctccccccaccaaagaattgagcaaatgaataaatgaatgaatggtagttatttgctattttccagtagttgtaatcagaaatgatattcaaaagacgaggcatcaactagttgcatgaggctttaatcctaaatggtcactgcatcagggagctccaggggcagctggggtgatatgggaggcacccgggggggtcagcccccaactggtccggaggtgttttattattcgacagttggctggctgtattggtgtgctctgtctgaatgtcagccctgcttgtcaacactggcaataggtcttccacactctttcccaatccctttttgatcccaaacaccagcattggcaggatgactgagtgggatgaaggttctagccagtgaccatagaacttttttcctcctcagtgcaaagccaactggcccacatcagtatcgacttcaactttgtcttctttggccctgcactgtgagatttgagccactggcctatgcagccagcttctagtattaccactgcctgatctttttctaccttggaaattttcattgtaaccactccatatttttgctatgatcaggcttataatgataaggcagggacttgaacattgcagggtgggttggcacacctcttcagatggactagctagggcacatgtcctccttccaattttctcttaagttgaatcactcctctggcttggccaggaggataccagctttgccaaggtgactttattatgtgtatcctggtacacattcccttttgtgtatgtagctctgtttcctggcatcattatttttggtagggttggggttgacttctggctatgtgctatctttccagctgaagtgttttgttcctccacttcgacattccatgaagccttgtgaaaacacttgtcctcttgtcggaaggttgtttgtagggggttatattgccctaaacttttccttccaggccatggtgcgatccacaggactgagacgagctgcagctctgctgctcattcactgcaggacttagggcttaaaacttgatttctctgagcctttattatcacaactgtaaagtggagataaggagagaacaaaagagataatgtgaatcgaagtataaagcaattgaaggtagtcattcattctaccacgcatcagccatagttcccaaccgtagggagctatggattgatgggggaaataacacattaatactcaattaagatacagattcagaagtcctacaaacagggataaatgcaaggtgttataaaagcacatgggaacagggctgaactcagtcttgaggggttagaaaaagcatagaaagagtaggaattattaatagtaatgatagttaaaattagtggggtgcttacaattcacaattgcaaaaatatggaaccagcccaaatgcccatcaatgaatgagtggataaagaaattgtggtatatgtataccatggaatactgctcagccataaaaaggaaagaaataatggcattcacagcaacctggatggaattgagacattattctaagtgaggtagctcaggaatgaaaaaccaaatattgcgtgttctcactcataagtgagagctaaactatgaggatgcaaaggcataagaatgatagaaaggactctggggactcaggggaaagggtgggagggggatgagggataaaagactacaaattgggaacagtgtatactgctcaggtgatgggtgcaccaacatctcagaaattaccactaaataacattcatgtaaccaaacaccacctgttcccccaaaacctatggaaataaaaaataaatgaataaaaaaatagtgggatgcttactgtgtgccaagtagtatgctaagcatgatctcatttagctctcacaaagtgtgcctatctcatagaggttttaactctcattttataatcagagaaactggtccaaaaagcttcagtaagttgcccaaggacacacaactaggtggcatggtcagatttgaatttaagttgaattccagaacccttgcttttaaccgctatgcaaatctgttcatgccatgcccctgcttaaaactgaccatttgtggccaggcgtggtggctcacgcctgtaatcccagcactttgggaggccgaggtgggtggatcaccagaggtcaggagttcgagaccagtctggccaacatggtgaaatcatgtctctactaaaaatacaaaaattagctgggcgtggtggcacacacctgtaatcccagttactcaggaggctggggcagaagaatcacttgaacccaggaggcagaggttgcagtgagctgagatcacatgccattgcactccagcctggatgacaagagcaaaaactccgtttcaaaaaaaaagacaacaggaaaaaaccctgagcatttgtgactttccattgctcatagcataatgactaaactcctttacatccctaaaactttcctgcccaaccctctggtcttactcttcatccttttctctgccccctaccccatggtcatcagcctcagcagcagatcataaaggatatactcagctaaggagtctgagcttgtcctatcaccaacagggagccatggagcttttaagcaggttgaacaggagtaagacaagacctgaaaaagccagtgaggaggctgttgaaataacccaggcacaggtacatgggggtgtgaactaagggaaagaaagagtgagggagagggagaggggtgaattggatttaagagacattagcttatggaatctacaaatcttggtgactgatgatgcaggggagtccagcagagcgaggactctaggcttatacccacagttctagcttagacgacaaggtagagggcactagctatttttgaggagctgctatcaatgcctaacaaaagccaacaatactcatgattctgcgttttcactacgtgtatgttgcaaggccctgaaagctgtaagatagtttcctttccctgtcccttttgttcactcccttccacactgagtgtgggaattcactgaaagctcagcaaaacccatcacctctgccacacccccgccccccgcctaagttgactacaaacccacacatcagacccaggttagcaatctaacagtgcctgaaattaagtgtttaaacattaaaaccaatcaagcccaaagaacctaacttgaaatgaagaggtgtttaaaagaagtaggctaaggtacaccgagaaaaacaacttaaattattaaagtggagttttcaccatgcaggaaaaatgtttcaataatgtcagattaaaaatgtaaatctatttaccttccagatgggttttatgagagctcttattaaaatcagctgcctacctgtttgtgaaagagaatttgttacttagggaaggtagtcagacccaggcatgctggaatcattttctcacatttgtcgctgactgaatagctcctgtgacttctgctttgtcagttaattactgtgtaaactttcccactgaaaacagaggcttattcagtgttgtggtttttttttttttttctgtttttttgtttgtttgttttttgagacgaagtctcgaagtctcgctctgttgcccaggcaggaatgcagcggtatgatctcggctcactgcaacctctgcctcccggattcaagcgattctcatgcctcagccatccaagtagctgggattacaggtgtgcgccaccatgcccagctaatttttgtatttttagtaaagatgggggtttcatcatgttggccaggctggtctcgaatgcctgacctcaagtgatccaaccatcttggcctctcaaagtgctgggattacagggatgagccactgcacccggcctcagtgttgtgtttttttctgaatccaagtgacaaatgttcatgttgtccaaagcggatttcttccaattcatttatcgccttcctcttgaccctgtagtgcatttgtaattccgaaattatgacattaatatcacttccatatcaatgaactttgtgtctaggttatatggttaagagagctttgagacagaattagtcagatggagaaactaggagggaaaaaaagtccttcataagtcagtgatggacaagaagacttattttcaactatgatgcaagaaactctaaagggtcatgtgttcattcatgaaataaaatattatctatatcagttctgtgtaatagaaatatgttgtgagccccctatggaagccataaatgaaatttaaaattgtctaggagccacataataaaagcgaaaaaaggtaagtgataattttaacattgttttagttaattctatatattccaatactgtatttcaatatgtgatcaatgtaaatcctactgagatcttttacattcttttttgtattaagtgtttgaaatccagtttgcattctatagttagagcatatcacagttgaggacagccacatctcaaatgctcaatgtcagaagtagctcatgactacagtactgcattctgcagatctatgcagttcagtgacagctttcctcatcaaattgatagaccaagaataggtttatacatgtaataaatctaccacctttttttttccagttgagaaagaaaatgaaatgtgactatgggaaaacctggccaaaatttatattatatgcccttacattatatgctcttatgacactatgtgatgtggtcatttgttaatttaatactcatccacatctcaattatactgtgagctccctaaggacagggaattggttttgttcactgcagaaatccagagcccacaacagtgtctggcacagagtgccagacaataactgtttgtcagataaataaaggaatgagaaggagtccttttgcttcatacaacaaccctacaaggtgggaacagttcttatgttcatttcacaggaaattgagactcagagataaactgagtttctcagccatacatagctaggaagtagtgggacccaggagcccaggtatatcaagccacctcaaagcccattctcttagttacctgagtctgtggcctcctgcttttatattgggggtagaaactgtgtgtgcatgtgtgtatgtgtgtgtgtgtgtgtgtgtgtgtgtgtgtgtgtgagatgtatttgtgagggactcagtgatcttccaccaggcagcttctcagtaggcagtttccaccacccactataatttggagtagagtaagccttccttggctgaatcctcaagtgaatttctattttcttctcttattggagagaagaatgaaaatcggatgaagggaagagagagcagagaacaagaaatatggaaccatagaaaccatgagtcacagaagtgactgggggagtcgaacgtctccaattatctctgcttcttatgaagtgaatgaagctaaggcagacttggtgtcagtaaactttttgtaggtaaggttttttttttccttggtccttctagtgtctctgctccttttatcttcttgtcagttgccacatgttcctactcttattcaagtttaaatattttttttgaaagtttgaaaggtctgcgtcttaggtgctttgtgagagaggtaatgatattgacgattaaaaaaaaacctgtgataacaaaactaacatatattgagtgcttactatgtactaggcaaaattctaagtgtttcccatgtactaacttatttaaaagatcctatggaaccattaagtcaaccctatggatgaccttaaaggcagatatactagttatctattactgcatgtgaattatcctgaaagttagtggcttagaacaggaatgaacatttattacatctgccagtttctgtgtatcaggaatttgggggtatctgggggttttattccagctcaccgaaaggtcaatcatatgttagccaagggtacagtcatccaaagactttactggggctggaggatctgctcccaagatggttcactccaaggctggcaagagagcaggaagctcagtttcttcccacatagacatatccacaggggtgctcgagtgtccttacaacatggtggctggcttcccccaagacaagtgatcaaagagaacaaagaagaaactgctatgtcctttttgactcagtcttggagttacctactgtcacttccacaatatccattggtcacatatggcagccccattcagtgtggaaggacactgcacaaaggcatggatgctagaaggtgagaatctttgagagccatctcagaagctagcttccacaacaattgccttgtagtgtgtaccacgaccacacaaaagctaatgtttctcgagcaattactatgtgcaaggtatcatgccagatactttatatatgttatctgtttaaatcctggacagcaaccctaagatccaggtgatactgtaatccccattttacagataaggaaactaggactcagagaggctaataacttgcacaaggtcacagagctagtttgtggcaagtgaaatgagcataggagcacatctcagacacaccacaagttcagtttatgctattttcacctgtaatgttgcagaggctgctgtggggagtaaatgagaaaatgtttgcaaattacagagcattgtatggaggcccacagagagacgacattctttcttccctccttcagcaatgtgaaaccgtgtcagaagcacacatgcatggtcagagtgtctcttggtaaataagagacataaagcactttgttttttatttttattaaaccaatcttaaaaaagattgattggctccatagacctaaacgattagcactgaaacctctcacatttcctggaaactgaatgttttgcgcttggaattctaaagaactgggaaaaaggagagtaataaagtataaagaatagtttcatctcctacccagcttatacggtgaggaggaggttggcagtgatttagtataagtataaaaacaacagtcgggccgggcacggtggctcacacctgtaatcccagcactttgggaggccgagatgggcggatcacgaggtcaggagatcgagaccagcctggccaacatggtgaaacccccgtttctactaaaaatacaaaaattagctgggcatggtggcgggtgcttgtagtcccagctacttgggaggctgaggcaggagaatccctggaactcgggaggcggaggttgcagtgagccaaaatgtgccactgcacccagcctgggcaacagagtgagactctgtttcataaataaataaatagataaataaataaataaatacaacagttgaccttaaataaggttttacattagtccaaatgatttcaaagacattaatatatttatatttaaaagtgtgtgtgcctgtgtgtatgtgagagagagagaacgagagagagagtcagagtcaaacttgcaaagtaaggaagttgatgtgtccaaagaaacctaaggaaataagaactatagcagtgggtcagttgcattatctttccgtatccctaatgtttggaggcaaatgagcagctgtaggagaaattatttgcttatttgcctcctcagatattattatcaaaggcaggaggcctcttcccaacaagcttcccggaacaatgcacatacccacatgcacaggacattttgcataaaattttaagggctttaaaattctttgaagcccatgggacgatctccataatattcatcaatcccaggataaaagccccgaatgccaaatcatttagataattgatttatattttccatgtgtactatgaactatggaacttaacctttcctccctcacatcacattttctcattaccttgaacaatcattggtatttttaaattttgacctgatcctttttagcctttatgtttccagactacagcacgcaattacagagtaaagtaattgaatcttaacacccttgagggtgtctccagggcatcccaaaatctgacgcaggcatcccttttataactgcccctgtacccataccttcccctttctttcagccaggtggagtttgtgtaaataaactcaacccttttgaggggtggattttagggatgcagttctattgttttgacaaatgtatacagttgtgtaactacctctataatcaagattagaacagtcccactgcccccaaaagttttaatttattgatccatttatcaattgatggacacttgagttgtttccagtttttggcaattatttgcgttagtcttttgctttttttgggtgggggatcagagagagtggagcacagaagtgtcatccccttcttccaccatctaagtcttttggggcttttcaccagtgccctctggaagcaagtgcattggtgcagctatattttttgcatttgggtatctgcctttcatgaccttttcctttttttaattttattttttccaaattgggtcccaaacgttcaacaggtcaaggtggacactatgcagacaaaataactcatgtggtccacgctgtgtgcatggtaggtgtcagctgctcttaccggtggctcccggatcatcagccttggaatcagccaccatgttgttaaaaatgcagaatctcaggctccacgccagatctactgaaccagagtcagtattttaacaagatcgtcaagtgtgccggatgcatattaaagtttgagaagcactggtattccacactcgctactaaaaatatactacaattttctcataagatttgaccctttattttaactttttctctctcggtagtaaactcactttgtagtttgagtaaagaactcaagttttggtctgggcgctgcatctcgctgggtgtggaagcaaaggcagaaatgagagggacaaaaggaagcagagaacagagcccaggctgttagaagatcctcgcggccagacctgggaggctgaaaggctgagagaccgaaaggctgaaccctccgccgcgctcggcggcccctcggagtcaggacacccagggtaacatgcgggtggccacgcgcagcccaggcgcttgcaaaacttagcggagccgggccggggccgggcccggggaaggcgggagggaggagggccaggcgggagggcggggacggcgcggcgaggggcggggtcagcgccgaggccgcgggggcagcaacgacgccgggcagcgggagcggcggccgcgccatgtggctgctggggccgctgtgcctgctgctgagcagcgccgcgggtgagtcggggggcggccggcgaacttcccgcggggcgcggggcgcggggcgcggggcgcagcggccgggtgcgatcgcgtcctctcccgggcgcgggccgctctccgggcgtgggtgagcgcggagggcggaccccggcgccgggctggcccggaccctgccgaggggccgccgcggggtgcgagccgtcctattgtgtgggcgtgcgcgccgggtcgtgttgtgctgtgtgcgcgggcggggctctgtgtgcagtccgggtctggggagcccggcggctgccccgattgggcgtagctcgagtgtggctgtgtgtgtgttgtgtgtgttgaggaacggaggcggggaaaggaaaggagaggagaggagagaactcttccctggtctcatcttcccagacgcctggtcgcgcgcggctgcgttagcctcctctgggcctcttcccgagtctctggcgtgcactccgtgcctcagtttccccacctgcaccgcggagggagtagcaaagctgcttcctttcattcctctctgggactgtttggtttgggtaaagtgagttgaagcaaggccggatctgggaattcatttttccccactgatcctgggaaccgaagctttatttaagacgtctgaccaccctacttgccccgcgatgggcgccctgaccggcgaggggccctgggagaggacacggggcttcatccggcggccctttgaacctggcatcaccaccgcgtgtgcatcccggggcctggaccgcagcaagcctctttcccttccagacagcgtgctgttcccaggaacttttctgctgatgtgggcatgatccgaattccagcctgggagcccttcctcctctgcccctgcccgccgcccacagctgtcagctgtccctcctggactgggcccgcccttggccccttgacgtttatttctgggcatctgatgcctagaatgtgggtgacagggcccagtgaactttcttcagcagaatcttgcctgcctggtgtttgtgccatccacatgtccaatagctgccctattttgccaagtgcttctagcagcttggctgtcgaggtgtctttggtggcctgtgggtttgctaagttgaggctcacttcattcttagctgtgccttggagttatgaatgcgttaaagggatatctcctctcttccttgatgtccctggtcctgggcatcctcacagcccactgggcagcctttcctgctctcagacccatgacatcatctccactcctctgataccccatttagatgcttatgggtttgctgggcttccagggagggactagacctcctggtgactgctgtggatttttaaccaggtctgggtgagagtgcccttaaattagtccacctggggagagagttctcacaggacattgggcagccaggagcaggtgtgaattgtttggaggctgttagagcaggtcgattttcagggcgtctacagatatgaagacctgtttggattcacaaattcaatctgtgtagctgtggtgtgtcccctcatagcacctgagaaggacagtatggaagctggctcttgtgtgtgtcctgggagagccactgtagccaaatggaaacttatttattgcatctcccagttggtactgggttgctttagttgagtctccatctctgtaaaaatagttgtaaagttaattttgtccctctctggtcagcagtggctatttaatgtgtgtgtgtacatctgagatagggctaaaataaataaaatggtcatagcaaggagcagacggatagggggaggaatagtccaactgtccctggtgggttttccattatctgtgggctttgaattacctttagagttgctgccttagaaacatctaggcaggttggagtgtgtgcatctttcatgttacattaagcatcatctttttagcatagatttcactttgacccaagtgttgccagaaacagggctggtcctttttcctaatgtcaactagatgctcctgggctcccagcccataagaaaagcctgtttggttcagtttgggtttcatagccagaccagagaccctacccctccatcccatggcctatgcttggatcctcttctgggaagttgataaaacaagagagattgtaaaagccaagactttggatctctgtctccatctgatagtctgtgaaagaatcccagggtcaaggttgaaccgtagttagagtcctgagtctttgtggggctggaaagccactgacattccaagagcagtttggaggccttttttattcaggaaccttctcagacaccttgcatatttttttcttcctttgtttttatttgtgttagggaagtgaagcattgattttcaccgttactattttttaatgtatcctgcgagagagactaagcccaagtcatgtcatctgatgtccagttttcctgcatgtgggtggactcagtgggtttaagtgcgtatggcttgagacatttctaaaggcagccatgctggatgatggtccatcttctcacctcctccaggactgacctttgcctagacttcctgacattctgtatcagtgaaaaggcttgattttcccaggagtgagtgtactcccaggagtgagtattgaccttttctcctggaaagatctgcttaacggtgtgaggggtgggttttattgtttttaacttgctgagtagctgtgcacatctcagcacagctcagctcgggaagatgaggcctaaaagaggccttgtacaccagagtacaaataaacacaccttgttgcttttcatcttcaaagagatgtgactaaggctccctactggggtgtgagatgttttttcctgacagccgacttaggccatttactctgggataagtgggggagggagagagatgggagtaggagagggtggggtggtaaattctgggccttgaagagtggtttagacacctttcagccagtctgcaggataagttgaaagtggacttgtattgtcacctttgtaaagcagtttagagaatttggagtttaggaacacttataatcaagtaatttcatgttaaagaattggccttaagccggagtaatggctcacgcctgtaatcccagcactttgggaggccaagatgtgtggatcgcttgaggtcaggagtttgagaccagcctggccaacatggtgaaaccgtcgtctctactaaaaatacaaaaattagccaggtgtggtgacgtgcgcctgtaatcccagctactccggaggccaaggtgggagaatcacttgaacctgggaagcggaggttgcaataagccaagatcgcgccgctgcactccagagcaagactgcctcaattaaaaaaaaaaaaaagaaaaaagaattggcctttacaaccttgcctgtttctgtgggcaagggaaagagagggaacccactatcagtgaagcatctcctgtgtgtgagatgctttgctcattactttaagcacatgatcccattgaaacttgccaaggatatcatgtggcaggaaatcattgtatggttcaggagagattgataatacccagggtaccacagtaaaggctgaagcctagattctaacttaagcttctctttgccccctacctgggcttttcccactctgtttccaggcttcctgcaccatgcttccatgcctttcctccacagtgctcttgcgaattgacacagtgagattgtttacatgaatgctccccctccccaaatctgttcactttgtggtcactgcccaggatctattcagcagagacatcagctttctttgcaggatactttggtgttcatggtaaatacataaaatacatctcaatccttatgtgaagatgaaactttttcagactaactctggtccttttgctgtgtgtgtgggtgagtgacaaacactaggcggggagatgataccagccagggttcgatttcttgacccgaattgtagttacatgggggttcgttttcattctttgagctctaaattcgtattcccctcttaaaatgtgtttattgtattttagaattaaaaaaataaggtactttccaccatggagatgccttggagtgatggaactgtttttagctatgggattgccccagggatggatctatttttggttgttgggttttcttgtttgttcttttcccctctttctgtcttcaaaatatttaggaaatgcttggaccattctaaccatgcagttttgttgttgttttgccagtgcctctacctgacaaccagggagatttttaagttggctgatcgtgtgtgtgtgtgtgtgtgtgtgtgtgtgtgtgcacatgcacacatgtgcatatgtatgtaactgccttcttctattgttgtgaaaaaatctactcacttggatgctaaggagtaccttgaagatgtttgctgggagagcagccaggtacttttgatatgccgtatttgctcgtcacatcattggcttgatgtttaatacatcttaatatagtacgtggacttttatgacagagtaactgcttggtcgggggagagcaaaagtttacttgagataggattcttagggcttttggaggtggttgcagggatggggttagtctcgggcagggtttctcagctttggtaccaacgacaccttggcctggatagttctttgttgtgggggttgtcctgtgcattgcgggatggtcacagcagcatcactagttcttgatgcctgtattggcttactcttcacccacagcggtgacagccacaaatgcctcccgacattgccacgttgcccctagttgagaacccctggtctagcatgagcaagtgtccttgccatgcatcttgagcatcattactgtgcatcattactgtgcatcattactgtgcatcattactgtgcatcctgagtgtgtcttctggatgcagggggtcaagatgccatcctcctcccaagggcctttgggctttggctttatgttttgtagccacacagttccatgggaaaacccattcttaaccaggaatgccgtcagcactgaccctttccctctcgctttcctcttgtgtcagagtgaaaacttctggaattttctatatgtggtttccttgggagagacatatgcagagaaagcaggtgataggcaggtgacagctgacaccaaaagccacctggttccctgaatgttaaacctgggaggttcagcagccctgagggagggctataggagcacaagctgccagattgccttggaagtcttgtgttgaaatcctaaccctggaagttccccttcctccacttcacagagtaggtattgttcttctgggctcccctttccctccccataattccttctcccttgccatcaaaaggccttacaacttgattcgttctgcaggtgcttgggaaaatcatctctactagcggcaagctgtgtgtgtgtgtttttagaagttttcatcgtacacttttttctctaaagtctctttgttgctctgtgtcactttataacacttcagttcctttaagacacttttccttccagctgtcgttttgctttgctctgttccaaaccttccttaagaattgtgcttccacctctcttcagactagccacataacttatctgcagctgtcttcttttgggcatgaattcacaggatgcaaggtggcacccagaggaggacgatggcttcctggggagaaatgcacattgtttcagttcaggtccatttatctgaaaccatgccctcttggaaaagccttctgtagtgaggagctttagcttcctgagtgtgcaaatgtcattttctttgtctttggatagttagcaatttcttaatattttatttggttgttcgtcattgtgccatcatctctgccacacccaggcactgtgtctatttccaggggtaggcgaagccatgtaaaacttgttctttgcccttgaagacccaaatgacccactgatggaaatgggattgttgaccttcttcgttatctgggaagggtagaggctctctgccagtgtaatctcggaggcatttctagacaggagttgtactgatggatcttggaccttgatgggaacacagagccgtgaagatgtcacagtgcccaggcaaacatgggtactgcgtcttcagggatatttaatcaatgtgtcattcttgaacaggtttcagaggtgatgacacatgtcctagtttgcttctttagctttcaagataaaatactggtatacgtgtattggtgctctgtgacttttctagctctaggcttctgaggtttgagctagaaatgtcttctgtggcttttggacaatagccttctttaccttatggtcatacacagtatatatgtgtatgtgtgtatgtgtatgtgtatgtctgtgtataccctggttatatatatatactgtatatgtaaaacctttcttaccttctaaatcctgctagattgaaagctccttgagggactgggatcatatattaagtgtctgtgatactttttcttttgtggtgtctagaagagtgagagtggctcccattcattgaaggtttactctgtctggcagggtggcaagcactgtacgtgtcttattttgttataaacttcttgaattacaaacactgcaaaaataatacacgggggccaggagcagtgactcatgcctgtaatcccagcactttggggggccgaggtgggcggatcacgaagtcagaagatcgagaccatcctggctaacatggtgaaaccccgtctcttctaaaaatgcaaaacgttagccgggagtggtggcacgcacctgtaatcccagctacttgggaggctgaggcaggagaatcacttgaacctgggaagtggaggttgcagtgagccgagatcgtgccactgactccagcctgggtgacatagtgagactctgtctcaaaaaataaaaaattaaaaaaaaatacacagactgagtacgtgcttatgatacaaaattcatacaaattagaagtaatggcaataataaaacattaaaatcctccttcatcttcctttcccatttctctcccctcccttaagtaactactgtgaattgtctggtatatatcaatttagctttaacatggatttataattatatacaggtacacacacacagagacataatttaatgagctcctgcttgtctctatttgtagttttttggctggctttttaactcaagtactatatttcatcaattttattttgagccatgtgaatgcgtcacatctgtctcctgttgtttagacatttcagttagtcccaagcaatttggcagtttccctcaccttcccttgctttgctcggctcttgaacagacaccccttttgttgctatctcagaagcacagctgatacaccttcagttatttgtgttttcctcttttaattctcttaaagggctggctcttgctttgcaagaaaatatggaattatggtaatttcttgcagtgagagatatttgcttcactattatcaaattcatgctgtttccctgcctctttgtgtatacacaaatgtgtttaatttttcatttcaatgccacattttaacatcatcttttgaaggacattctaaatagcaggtcacttcaacctgtgtagtaccagccatgcacataactggagggaagtgacgaaataggaacagctgtgaccaagtttacccaggcactgccagtgaccaataaatcacagcttccgcccaccctgtgcttttagaagatgcagttggccattaggtacatcctgatgtcagagatgttacaacatcaaataaaagtgtcttcttggccatctttctttcggctcttatatacctacccatgcttttaaaaacagctttctggtgtgtgtacatactataatttatttaatgctttccctgctggtggatcttatttcattttcagagtagtttattcaggtgggtagtatgctttaccgttttatagatgaggaaactaaaaggttcagtaactttcctaaaccttcgaccagtaagagatagtttcagaattggcacgtgggtctgcgtgacttagacttggtctcctaaccactggccctgctgctttggtatagaatagaaatccaagtctgtatgtgttgggagaagaattgcaccgtctaccttgtgctggagaattccagcattgcatagggatgtcaatattgacttcatgcttatcgtgttggatagaatgatttgttagagagccattggagtggggggcatctcaagttgattctactcaaatggcctgtctttggcagatagaaactgctgttctcctatgtggagaacgtatcagtataggtgttgaaattggcttttgcaaagactgaatttattaaacaaaaataagaataaacaagttatttcagcaccatgacacttgcctttgaatatattaatgatagagataattcttcccccctttatgggaatattttgttggaataccaaccaaaagcaatttcttttcagcacttccctcaaatagtgctgggtgccaaatagaagggcccactgttcaaaaagtctggaaatatattttctagacaaagatacagtactgatgataatgcctcgtatcaaaagagaaattaaagtatttttagaattactttctgaccctgagcttaagcttatatggtccatgtatgagagaacatttcctgaactagagattgatgttctttattgtggaagctgaaattttaatatgttgctccagaaagaaactagaaataattggccccatcttgttgcttcaaactaaggggctcttgtgcgaaagtaggcagtgatgtcttgtgagaaagtaatgccacaggcctgtaaagtgttagctacaggcagagcagagtgaaccccaggattttaaacttactcccaaggcctttccagagacctgagaaccggactctccttttgttgagtcattgtgatatcaagagacaggtgataaattgggtgaattcgctgttgcccaaatccaactgtgatttttgacagacaaatagcgcagtgtgcagacgatgttgtctctgtcctggcgagcggccacggggagggagggcaggccctttagcttactctggaacaggccttgggcatccgggtgctgcaaggatgtggaatttatgaataacttgatttagaagacttgcatacccaaggtgccagtgttccaggtggcagtgggacacttatgtgtttgttggcataaagaaatgaaagcataaagggtgtttaattttattgcattaaaaatcccttctcattattataagaccgagtgagtttggcttagcgaatgtcagaagtgtgtcctctttgatggcattactggaacattttccttcagctttagccttgaatcagagcagtgttctccaggcgtcgttaaactaattggacatggctgaaaaatgagccctagtcacacttgtagttccacagtccgttgaaaaaagcctcttgattgatttggaaagttctaaatttaacttgtttttttattataaaaataaaattgggggaatttggggaggggaagagtgattagcaacatagggtatttcatcagagttcaagctgtaaagaatggttaatgctaagagaaaccagaacagaactaaataaggtgtttcaaaaacagattgataaaaacattggcataagcttgattaaaaagtatgatactagcaagtgagcccagctggcaggaacctggggaagcaggattggaatgagttgatgcttactactgtaaaagagataaagttggaaagaatgacttttacattaagaatatttggtattaatgaaagatagaactaatcttgtaaatgttacagtgtaacaataaacatcggtggatcctatgaagggcagtggtgacataataaaggtttagcatacccagagttcatttgtgttattcaagtaaatgataatgatgacaatacaagaaaagctaacaggtgtcaaaaatataatagggttcagtttttgaataataagcataccagaacagtcagagatggtacaaaatatgaatgtatatatattcagcggaaggaacactgcccagaattgaagggcaacgtcaacatcttttaaaagtacccataaaatgtgacttggcaacaatcctgaacagaaaaaagaattcttctcttttcctgtgtgactaaagctccatgaggtgggatggagtctattgtgtttttgatgtctatcttatttgttgttatactccagaacctgattcagtgcttggcatagtatcaggcacacagtaggatttcctgtaagttaccctacaagaaggaatgaaggggatcactaaagacatgactatgactttgaaaaagagacggaattgggagagtcagactaagccatggtgaatgaaatttacctggccaagctaactttgccttttggtgaaaattgcttctccttcgctggagtttagaacagtctcattgatcttcaaagacttggaaagatctttacaggatatcccttggcttaaaaagacaaagaaaaagaggcctttgagagggcaatgtattatagcaattttaaatcaggtgataaattagattcattatgagactagcatgtgacatatcaaaagggtttctgacaggctaatgaaaactgctatgcatcttaattccatttgaagggagtttacatagtttactgaacaagtaggagaggtcaccaagaggaaataaattaaagcaggtctgttttataaaataacagtattaggccgggtgcactggcttacaccttgggaggccgaggcgggcagataacttgaggccaggacttcgagaccagcctggccaacatggcgaaacatcatctctactaaaaatataaaaattagccgggcatggtggcacatgcctgtaatcccagctactcgggaggccgaggcacgagaatcgcttgaacctgggaggtggaggttgtaatgagctgagattgcaccactgcactccagcctgggcaacagaatgagactctctctcaaaacaaaacaaaacaaaaaaacagtattaaacacatgaaatagtaaggaacaattggttatcttctggtctagtttaaaaggaaataaaactttgctggtcaaaccacgcaaatgattccaggaaggaagcacatcagtaaatataacattaaaggtaagtggaaggtgatatgaatacatcaactaaagactaaatgtaaagcaaaatgttactcttattaaaagaaatcacctatctgctcactttcggacacgtagtaaaattcaagagatataaatagagtgaaaagttaaggaaataaaatccattatgtaaggactacttttatggtatcatataagtaatttcatagcattaagcattaaaatagataaacagggttactgcaaatgacaaaagattcattaaaaaacaaatatctgatcatcccacataaaaagacatgaagaattaggaacataatgaaaggatgttgaaggttcttcaagtataaaattagctggtgcttgccaaattttggaaggttaaaatatttagagaatacatagttctaatgttttaagtaaagtctgtgggaatggggaagtgctcatcaggtgctgaggactgggtggtgtgtgcagtgggaatggtgggtgggactgaccagttccttggggagcccccaggggcctttcctacacacctgctccctggatctacagaagtgctcactcatggaagctatggggataaaatccttcctgctaatgagatgagaaggttgattaactttgagttgggcttagtgagtctgacaccagtggctgcccaaggggagtctgctggtgggaatttacaagagcagcttcgggcctctcatatggatggaaagaggatgtaaaggttactgaggagaaggtgtatttttgttatatattattaagctttcatgttatttaaattattcgataacagagctgggtatggtggctcatgcctgtaattccagctactccggaggctgagacaggaggatcgcttgaggccaggagtggagaccagcctgtgcaacatagcaagacccccatctctaaaaataaaattcaaaataattattagaaaacattttcctggttgaatatagtgtattttctcttttaagattttacaatatggattgtgtagagctttgctactcttagtgtggttgacagaccaacagcatcagcatcacctgaatcagaatctgcattttaacaagatccccaagtgatacatgtgcatattaaagtttgagaggcattgatgtggtgattaagaatacaggctttagagtgagtcagtctgggttcagattccagttccttgccttgaccttggctaggtttcttaaactttttaaatccatcacatcttcgtctgttaataggtataataatggtccttaccatgtagaaatattttaaataagataatgcatgcaaaacacttaactttatttttatttattttatttattttttttgagacggagtcttgctctgtttcccaggctgggtgcagtggtgcaatctcggctcactgcaagctctgcctcccgggttcacaccattctcctgcctcagcctcctgagtagctgggactacaggcgcccgccactacgcccggctaattttttgtattttcagtagagatggggtttcaccacgttagccaggatgatctcgatctcctgacctcgtgatccgcctgtctcggcctcccaaagtgctgggattacccaaagtgctgggattacaggcgcgagacactgcacctggccacactttatttataattgctcactaaatgttattgattagtaataggtttattataaaaacttggacaaaaggtagaaacacataacatacagtctaccacctaaagatttttaacacattggtttatttatttatattgattttagatagttttgatcatacgtggaatataatttcatgtcctgcttttttcacttctgaatatagcataggcgttttcccatgttacactaatctacgagtacaagaagtctcccatcacagaatgctgggtgtattctttgatgttggctgtaaaaatcatctgacccacccaagccagcaacatgctgcctcacagcttatatccttgtctatatgtaggagatgacattacctggcccctctgcttttacatgatggtcatgagaatccagttggaatcgtgtaggatgtaaaaacagctagtaaaaagtaaaatgagctgggtgcggtggctcatgcctgttatcccagcactttgggaggctgaggcaggtggatcacctgagctcaggagtttgggctgggcagcctgggcaacatggcgaaacctcgtcactactaaaaatacaaaaattagccgggcacagtggtgtgcatctatagtctcaggtaggaggctgagacagaagaatcgcttgaacccaggagacggaggttgcatggagctgagatcgtgccattgcgctccagcctgggtgacagagtgagaccttatctcaaaaaaaaaaaaaaaaaaaagaaaagaaaagaaaaaaatacaatgccgtacacatctgtgttattttaagtgggtgattctaatatgtaggaaatccctaaaaacagaaattacccgttgactccacaattccacttctagcactttaactcagtgaaatagtttgcaatgtgtacaaaagtttggcaatgaggatacctgtgtttgtggcagtatcatttatagtggtgaaacactggagactaacaaaatgctcactagtaggggagagttatcgtgccagtatactaaaatactatgcagacattaagaaggatgtcactgacctgtgttctccagtaaggtggccactagccacctggggctactgaaatttaaattagttaagtttaaatacaatgtaaaaattcagtttctcagtcacacccagcctatttcagatgctcaatagtcccatgtggctgatgggattggatagcacagacacagagcatttctgtcattgaggaaagttctaatggacagtgttactgtagaataattcttccacggaaagaaaattcttacgaaacagatgattcaaatttgtagtgtgtatgtgtgtgaggtacaaattgccccatggtgcttggtgcccagcacttcatttctttattttcctctgttcagtccaatctggccgtagtagtccccactcactaaaagctagagatctgatgtcagtcacctcgaagaattgacctttggtgtaggccaattcttgagggccctccttttcctgtaggctctctcaggactcctgggtgcctggtctgatcattggtgttactattgcattttgttccaaagcctgttgttgcccagccttggatcttcttttcttccaatttcttcagtccaccttttcccatcaattaactaccccctacattttacagcagtgatattcaagggttggggaagaggaagccactcttcctctccctcattgagatcgatgggagagtgttacctagggggtggaaaaaagactgaaaaccatactacatgagtacaaggtgacaaccaccccagaccttgattcacgtgtgcagacgtgcgctgctctcgtctagtttgcagaccctcctggaaactttgcaagaaggctctgtggtcactggaccctccatcccctgcccctcccagcagcattgggcctccaggctcccaggccttgccacacgggtgaactgatacaaatcaagatggtgtcggtaccatagtgatccctgtttcttgctggcttttttagcacatgattctggtcagcctgatggagaaggaacgccgtctcccagctcgcaacttttcccacagctcagcgcagccgtatggattgtgtgctcttgtttgctgtctggtctcactattaattaaggatatgactgtgtttgcagacagtttatcagagaaagcttcctgttcaccctctgaaacctggctagtgaatctcctattctagaaaagtgtcctcccatcttcaactcccaatcagagaattaatctctgacttcttaatggctgcctgtaacttgtatttgttcgtgtagaacttaacacacagtattgcagtttatttatgcttgttctctatacttgaatgtttattaagcctagatgattataagattaacttgggtgctttaaaatatatttttaattactttaaattattgaatcttccgaatagcgtaaaagatctgagaacagtataacaaacagtagtgtacctatcatatagatttatcagatttttaatatatgtcattataattcaggctttcctcttaaaagaaaaatgtggctaggtgtggtggctcatacctataatcttagcactttgggaggctgaggctggtggatcacttgaggccaggagttcgcgaccagcctggctcacatggtgaaaccccatctctactaaaaatatacagaaaaaaaattagccgggcatggtagggtacacctgtggtccctgtagctacttgggaggctgaggcatgagaattgcttgaacccagaaggctgaggttgctgtgagctaagatctcaccattctactccagctttggtgacagagtgagactccatcccccgccaaaaaaagaaaaatgtattacagatagagtcaaagactttgcctcatcccattactctctcttggcccagaggtcatcactatccccaaattggcatatatcctttctgtccctgtttttagtcttttgctactgatgtgcacttacatcccttgcataggattttaaagtgtgcttaggtggctatcaaatggcctacgcttctgcagctggcttttttcatttacctttataattttgagttccatcccatttataattttgagttctatccacattgccacatacagatacagtttattttagctgcggtagaatatcctattatatgaatatactacactttgctcattcatctcttaaaaggatatttagattattactatgactagccacactgcagtgaaaatttttgtgcataatagcaggactttctctataataatatccttgaagtagaattgctgatcaaaggatttgcacgttttcaacctgagtagatattgccaacttctctataaaatggtcctgcccatttatcctctcattagtggtttatgagagcatctgtttctccacttttcttccaacatttggaatttagagtttttaatttgtttctccaaggtgcaaggtggtgacttgctgtgttttgttttgttttgtttgtttatttttgagacagagtctcgctctgtcgcccaggctggagtgcagtggcgcgatctcggctcactgcaaccccccgcctgttgggttcaagcagttctctgcctcagccaccttagtagctgggattataggcttgtgttcccacatctggctaatttttgtatttttagtagagacggagtctcaccatgttggccaggctggtcttgaactcctgacctcatgatccgcccgcctcgcctcccaaagtgctgggattacaggcgtgagccaccgtgcccggcctgctttggttttaatttgcctgcccctgatgactggtcaggggagtggtgggctgtggccaggcctgttccctcatctcccgctgaggtggataatggatggggaaccccaaggccattcatgacaggcagttaagaggcggttgttctactgttggcatggcatgaacgtccaggccccagctctggaccgtaggactgggtgataaggtctcattctgctggagatcagaatgtttcccaattgtgtggattctggtgcccccgtggctcagcgtatagaaggcagtgagcgtcagccatgtgctcctcctccctggagggtgtctcattctgtgatgctgggaccattcatccagggtgcactgctgcaagaagataagcaaagcagtggtgagcccttttctaggctccgcttccactggaggtgtgggagagtgatggttcagaaggcaggctcttgaaccaaacagtctgaggtcagatcctggctgcgtgaccttacttaggccagttacagagctgctctgcctcagtgtgttctttacctgtaaaaggaggataaggttaatagcagcctcacagcattcttggggagagtagacaagatcatgaatgcaggttgcttagcccatgctggcatttcaggagcactcaccacatgcttaccaatccatgccgagactagggttgagggctgggagtgtcatttatctcaaacccccagtgcctagcttgttgaataaatgaatgagtttctacttagtgacttctcagttgtgctttggtttgtacagcaggctatgtaaagcttttgcattttactctaacaacaatgagaatattaaaatttttttaaaatttaaaatttttgtgtgtacagagtaggtgcatatttacggggtacatgagatgttttgatacaggcatgcagtgtttcataatcacatcatggagaatggggtatccattccctcaagcatttatcctttgtgttacaaacgatccaattatactcttttagttattttaaaatgtacaatgaggatattttaagccagggatgactgtgatcctgtttgtggtcttaaaaccgagatgaggactcttgatcctcctgaaaatttcagtcctgaaatttctggtcactaatcatgaactagaaattagactttggtgactcctcattttcacattttcacttaaaaaatttattatttgcattttttccccctccttgaaatgttcttccctctgtcttcttggtctttttgaaatacatttaaatagcctttttccttttttgttgattctaaaatcctcacgtttttggagtttgaacttgagcttgtctccaagttctaggggtattctctttcatgacctaggacatagtgcagggtcagtgctaagtgagattctggaagcagagtcttcagaattccaggtatattttagttttgctgctggttcaaacggctcatctcagtctcgttttgcctctacagaaagtacctttttcttcctgaattttgggtggaagagggtatacccaccctctggggccgtcatcaggactaagtggctgatgatcattttccatatgttggttccacactgacttcaaaagggtatgaacagcttgcgtctgggaggctcattaagtttcctgggctctctggaccacctccagtttaatgagttcatacagtggactaaagagcctcaaagattatgaaatagaaatgccctttctctaagcatatttaggggaggacacactgactgttccctttcctgtttaaatatgttatatttgtttgcgagatggaagaggaaagtagaatgaaaagaaattaaaatctctgtagacttgagctatttgcatacataggacaccatgaaaaggacatttagtggattcagaactcaacgtgggtggggaacgaaacagagggtaaaaagactggctttgcaaaataaataacagtgtcacttggaagtggtgatctgagtgaagatatggaaataatgtggtaaagactaaaccagaagtagatataccagaagaagacataatcaaaacaacacagagatcagaactacagagatgtagatgttaatgggagaacaaagtagagttatatggtgacagtcagtcacaactgtggagggaggaaggccaggccacaaggacgatggatttaaatgccattttattaaaattttaattactgtccacttgcattgcctgagattttgggatgaacatatttgtgtctgtgcatgtatgaaaccaaccaacggtcccatagatagtttttttgggtaaacatagaaattgacccttctggtcttaaagcttgaaacttacatttttttaatatgtgttccttccttaggaaatgatcttcaggcctcttaaaaaaaatatcaaagaactgaaactcaccagatcaccacattctgacagttagatgtcagaacccctcattcattacaattgtttccttgcctctcccagttctgtgtgtgtgtgtgtttttttttttttaacacgttgttacatttcttccctaaaacctctagttttagttattcagggagactgatttaagactgagtctcctcggctttgccacccgattaaagccttcttccttggcaataatcatcatctcagccattggctttctttgcggaaaacagcaggatgtagacccaacttgtggtatttctgtaacatatatacccacatgtaaacactactgttcttcgtcctgggaagaaattcaacattggccataagaagtctccactctgtatgtgcttaccatctatttttaaatgacctgtttggtattattgtcactggctttttaaaacaattgcttattgttcgcttacttgtaaatcaatatagtaggtatggttggatatgcagaactttcccctgaccttaagtaatgaagaatttatgaaaagagggaaaacgtgcacgtgggtctctgagtaaggtgttgtatagtaatgtggtgagtggcacaagagtgatatagacctaatgttgctggagttagaggaggtccccatttcttccggccatgatgaataaacaaggattgggaaggcagtccttgatgtgatggaattccaggatggcgtgggctgggtcccagaggagagaaactatgcagtgtatttgggaagccataagtattacaagtttgctggagtcttgagcaatggaagataaaactagaaagagggcattgtctactaggaacactcctactactaaccatgttcccaattatttggtgcttactgtgtcccaggctctggggaaagtgctttacccactggatttttttgaatcccctcaagatccctatgaggtcaagactgtcatgatcgtgatttgacccagtaggagactgagtttcagagaaattgaacaacttgctgggacttgggtgagagcgaggttgtgtgagtcctgggcttttccagccccacagtcttgctttggtagatggggtagtgatgaggccacagagacccagcttagaacttggggtttgggctttgggacataggcactgggaaggctttcccttgctcagggctctgtttggaaagcctggagttagcctctactttggaggctgtcgtctgtctgagtgtaaccagggcctggtctaggctgtcagatgcaggctagagggaagaaggcccagatttggacaccattgagggaatggtttcacttgaatggtgagagtagaagctgggtttgtaaattagggttgagcctgggtgtggtggctcatgcctgtaatcctagcacttggggaggctgaggtgggaggatcacttgagccctggcgttcaagaccagcttgggcaacatggtgaaaccctgtctatacaaaaaatacaaaaattaggttggacatgctggtgcacacctgtagtgcctgctactcagaagcttgaggtaggaagataacttgaacccaggaagtttgaggctgcagtgagctgtgattatgccaccacacttcagcctgggcaacagagcaagactgtctccaaaaaaaaaaaaaatagtgttgagaagagttgagctggggcggaagtggaggcagccaactgaaactgattagtataataaacacaattcccaggcttggatattatggaccagtaaagtaatgaaaaaaaagaaaaaaacaaaagcttgggctcttgatgttgagtcacccgcttttatttgatcagatgagaataatgaaaaccaaatcactctctaattatccaatcattattttctaaaataaattatgttttaatacaaaaatgttgtaatggctcatcagaatgaaggatggtcctgtaagtggaataagtttaattctaagaagagcttgctgcaattgtgccttcattttctacttttgttgctaacctgtgaaccctttttcacggaccagggtgttcttgtaacacacatttgggaactgctggtagagactattctgttcagaggcttgactggaagagaggaggctccaaggctgtggctgggggccatgggagggtgtaggtaatttgttttcaggtatgtgggtatttagggtttcaggaagagttttctaaagcaggaagtcctcactatgtgccgagaaactggggaggcctttgtgaagataggaatgggtaaaaaattctggagagaggagggaggaaaccaaagagagatgggggaataagatttatttagcatctgccaggcgtatgttaggagagaggtctgtctcatttaatgctcttaaatagtctttggggtcagagacacactattttttttaaagaatagtgtgagggtttattcaatttaaaaaattcgctttttaaaatcaggaaaagaagaaaatccaacagtaaaaaaagccattaatcattaacaggttgcattcattaagatgacacaaacaatttatcaaatacctttatgaccaacattattttatagcagatcctgactgttattaacttttggatctgtgaatctgggccctactgccaaggcatgttactactgacctactgaattctcttacccttttatcacgtaaaatgttctctaacgtaaatttttcattctttgttagtgacggtatgacaaagaagagtactctacctgtaatttgtctttcgacaagataaaatgctttatttaaaaatgcaggctgggcgcagtggctgacacctgtagtcccagcactttgggaggccgaggtgggtggatcagaggtcaggagtttgagaccagcctggccaatatggtgaaaccccatctctactaaaaatataaaagttagccagacgtggtggtatgcacctgtagtcccagctcctcgggagactgaggcagaagaatctcttgaacccgggaggcggaggttgcagtgagctgagatcgcaccactgcactccagcctgggtgacagagtgagactccgtcccaaaaaacaaaaagcaaaaatgcagtattcttttcctttaaaaatgtgtacataaaaaggatttggataaagtatgatgaaataataggaaacaaggccaaattctgataaaataaagggaaattggtgaggcttggaacatcaaaccagtcagaacgtggccacaagagggacagggcaagtagatggagaacagccatgtcaagttttccttgaaccttctccatccagcgtttttgttctgcaattaaacaaccagctcagagatgtccaagttatatacagtcttacttttacccacctcatgtaatggtgaagccatttatttagtaaatacaatatcagaaagggtatatatattaggagacccacttccacaaaggggttgggaactctttttcagaaatagcatcatataacctgggaagtactgtggaaatccaggcacattttcttgtaaactgttacttgaattcaaaaccaaattctattcctttctatgtacagcgaatccctgggatccttggtagggcaacctcctaatccataaggccaagcaagggctgtttcctgttttcttcctttagttcagaggctcatgctgtcctgaggtaaagcttgaagaccttgcactctttcctcctaccaggcatttggtgttttctgatcccgtgtggtcccaaagacccgagggtcaccatgatggaagtctccctgcagggactgggcctgctgggcttcccttagttccctttccagtgcagctgtcttggacttttccaaattcagctgctgctagagctcttctgctttccccagggagggccagggccaatttctgaccagagctgctgcagaaggtctctctcctggatcagggtggatcatgtgcttgagcagactgtaaaagtcttctgagagctcctgaggaatgtctgggaagttactctcatggttatggtgccttgcagcactgttgatgggtaatgtccttactccttcagccattgcagtgattaatcccaaggcaaataggtctgctttgggaaggtactaataatcctcttgcaaaatctcatttgctaggcagcaactatctgctttttccactttgagtttgcttattgatgtcacatggcctaggtcaccaattttatatatcacatgggcagagagaaactaatcagcttcattttcaacttctgtgactccagaggagtcactttgcatcttgtgacaaaggaaggttttacaaggtttcatgtccgggtgcaccatgccagagttgtggctgtatttaagttcaagggaaatctgtagaaggatgtccttgagttttggctcttggaagtgattagtagacttagtgttttcagatatagcagcctgcaagctcctgccattgcagtatccattctgaatgatcatatggttatcttctgcctgtaaggggtagtaatgtaccaggtggggtgatgtccaaacactgtatgagcataaacttcacgcaaagccaaattctcaggtgaaatcctgaaaaagttttcatatagtgctttattgcataaacacttctatccaggcttttaatgcacttgtagactgtaccaaattcaccaaccccaattttttctacctccgagcattcttttttatagtaggaagccatgttggtttctcatagaacacatgtctcagcaggcagcccttgttcttccttgccttcctctggaccagcttcctcaagatcatctcgaattttcctcttgacactggattgaaggaataattttctataggactttggggtgaagggattagtattgaccagagccagtgaggtcatctcatccttgggaggagtggatgtgagcatcaaatgcttagagcctctggaaggaggctttgctgttggagaaataacgtctggctcagcgggcttttgggagtagaggggctggcaccatgtggctgcttgttcctgttgcctggttggcctggtgtctcaggatatttgagaaggtgtgacactggagtcctcaaaatctgatctggatcttctttttctttttcccgaggtgtgttgagttcatgcacgttactgagaggagtcctgggcaatgtaagcattgcctctgaattctgcacttcactcttctctgggatctggctctgggcctccctgcttccctgtgctttcttttgccctacattctgagtctcttcttccaaacaggaaaagcttaatttctcagttttaatgttttaatttaatttatgtttaatgcctcagttttttgttaatatttctgtcatccatctcagccaaagagctttacaacataggcaagatctattgcaagagaacaccgtgattctgcagaaagaggagaaaattatttaacctggcaggtttcacaactctagcctgcctttccctctaccagctaacatctagctgtttcagatggttaaattcctcacgtgtggcctcatcatttggtaactggcagatgggactctgtcgtctacagatctgtttacgaacagccctttcctaagtgcatatggtgtgcgtaccaagtccccggctcagagtcacgattttatacacaggttccagccgtggaatccacatgcctcagactggggggcacttccccctcaggacaccgaagctcagagagaggaaagaaatccctaatattccagatgcagccaggatttcaacccaggcctctgtcttctcggtcgaggtccttctcacttcatgtccatggaggcttctctgctcacgctggtgtgaaccccaaggggcttcccctgaaaactcataatagaatctttgaacagctgcccaagaacagatttcagattttcagccattttcctcttttaatggaagctctgactggctagttggttaatgggtcccaggttctcccaagccacttaacttcctaattttcaagcattatccatggagaaaatccactctgcagaagcttatgacttaatgagctcagtcaaagtcaatctgaagttgcaggcagcagctttgatcattgtgataggcgttttggtttccaccgagcagagaatgggaaaaagctttgcccatgatttattaatcacttccttggctgagctttcttgcctggctctcctgggaagcaccagtgttgaggttgctcagggttcagcctcagcatgggctttaggtgtccataggccccgtgttgccttgtttctggaaggctttgctgagctggaatgcagccagatgttggaaccagaggtgcacaccttgagtaaactcctctctgctttcaagcagcccttgaggccccttattggcagaaccagctcctccagggaggaggcatgtggggcccacgtgcatgcgtggagtttttttcagagacccactgataaaatatttacttcagtgacatggtaccaagtcctgctttgtttattttaaaagtcttaatacagcattagccatgaggataccggcttatttgcttttggtttcttgcttgtggtttttgtttttatgaggagcaaagaagctaggcctgatcttctgggaaagtagcctgctgtatgttagccacacactggaagaggaaaactgttctgtgtggagtgcttactgtgtgctccgggtactgtccttagtgcttttaggtcattatttaatcctctcacaatcattcaagtaggtgtcacaggttaaattgtgtcccctgaaaagatacactgaagccctaaaacctggtacttgtgaatgcaaaccaatttgcaaatggggtcttgacatatgtaattcgttaagacacagttctgttggactggagtgggccctaattcccatgactggtgtctttgtaataagagggggtacacagacactcacagagggaagatggccttgtgaagacagaggcagacactggagcatgtaggtgcagggcaaggaatgccaaggattgccagcaacctccagaagccaggcaaggaaggattctgccctggagttttcagaggaagcatggccctgccgacaccttgaacttctagcctctagaattgtgaaagaacatatttttgttgttttaagccactcagttcgtggcaattaattacagcagcccttggaattagtatagttagaactacttagaagaatattaaccccattttatagatgagtacatcaaggctgagaggtgttaagcatcttgccccaggtcactcagttcataagtggagacagacaaatcaggtcttgcataatgccgctgccaagtccatgcattcattttcatgatggagccagcaaggtggtaactttctaatgctgggtatctaggacatcttaatgagcagtttagtctcaaagggagattgcccagttgcagtttagatctgcttctaatcctggatttggccagaagattccttgattgactctgggggaacctttacctttatagagaggatacaggcctggtattttctgtccaggggatctaagcatggggtggagtatgccatctctccctggtgctcagccaggcctgtgggtcatcaaggacccagcccattctgcagagagtttagacagcttgcccaaagtctatctgtagttggaagaagcatgactggaagggagataatgaaagggtgccatttcttcctgatctctctaattctgcctgtacccttacccccatctgaactcccacccctgcctacactacccttccatctgggagagagaatagtaggcaggggtcatgttttggaaaggatattatttcaagggcgttgggaccccagtgaaagattttattgaggggagtgacatgacctgttggacactgtggtgggctgatttgcatccccaaaactcatatgttgagccctaaccctcagtacctcagaaggtgactgtatttggagatagggcctttaaagagataattaagttacctgttaggctgttaggataggctgtagcccagtttgacctatgtccttgtaagaggaggagttttagatacacagagaaacaccaggcatgcacatacacagaggaaggaccatgtgcagacacagtgagaaggtggtcatctgcaagccaaggagaattcttgagaagccaaacctgctgactccttgaacttggacttccagcctccagaactatgtctgtcattcaagcccctcggtcagtggcattttgtgatggcagtcccagggtacgaatatagaaccaaaaagatgaattgagcctcagggcggagaatggataggggagcaatattgtgggtattcagaacagccgggaactcacaggaaagaggaaggtggtgtggaccagggagatctacagaggtgggaggaagaggacagattacagaactgtgtaggagccttaaaactgattattgggatggggaaggagtggggaaagaatccaggaagatcccagtattctatctgaatggatggtggctccattcactggtttatgggaacactgaaggagctgccggtgtgggggaggagtcccagttgtcagtaagatgttctctggcaactggtttttgtatctggagctcagacaagagatctgggcagggatggggatttggaaagtactggcatctagatgaccactcagctgtgggtaccaatgaggaggaggagacgaaaacttgttaagcacaaaactctgtgaaaccccagagtttcacagaaaccagatcttaagggaaggcaccaccgtaggagaataagaaggggaatcaccagaccactgtgctgagaaactgagggaaagactgtttcaggatgacagttcaagacacgggccaggatttaggagttatcagcatggagatgttagggcgattcatcagtgagaatcttaaagggggaagagcagaggaccagagaaaccacaacagcttaaacttttttttttttaatcgtttgttttcaaattggtaatagatataatggtataaaattggaaagagaatttctcatccctgctgcttcactgcacagtttactggttacccattctccagcccagaggaaaccagccctcagattcttgtgtgctacttcagaggtagctgtttacgtgcaagaatgtatgtaggtaggtatgtctgagcagatagatagtctgaatttaatttctttgcagaaactgtagcataccatgcatcctattctacaaattatatgtatttattgatatgaattttattgtttgaaaaagaaatgcaatcgtatggttcaacatttaaaaggtataaaagaggtcaggcgcggtggctcacgcctgtaatcctaccactttgggagacccaggtggatggacttcctgagctcaggagtttgggaccagcctggggaacacagtgaaaccccgtctctactgaaaatacaaaaaaattagccaggcatggtggtgtgtgcctttaatcccagctacttgggaggctgagacaggagaatcacttgaacccgggaggcagaggttgcagtgagcctagattgcaccattgcactccagcctgggcaacagagcgagactccatctcaaaaaaaaaaaaaaaaaaaaagggagcacataatgaaagctgtccttttgacctgaccccagctgccctggtctcctccctggaggcacctcagttttgttttgttttgttttgttttgttttttttgattattgttgtcgttgtttacttactaaatatatttcagagatctctctttcagaatggaaagattccttattctgtgtgtatggttcatggtattctgttatatatgcactataaattatttcactctaagctcctattggtagacaggttgattcacatctttgctgtgacaaacaatgttacattggatagccttatgcatatgtcattctaaatacctgtagaaatggaattgttgagttgaagagtcaagggtgtttgtaggtgttttgtttgtttgttttgttttttttgaggtgtagtcttactctgtctcccaggcgggagtgcagtggtgtgtggcgtgatctctgctcactgcaacctcagcctcctgggttcaagctattcttctgccttagcctcccgaatagctgggactacaggtgcacgccaccacgcctggctaatttttgtatttttttttttagtagaagtgaggtttcgccatgttgcccaggctggtctccaactcctgaccttaggtgatatgcccacctcagcttcccagaatgctgggattacaggcgtgagtcaccgtgcccaatcacatttgtagttttgatagttactgccttgatgtcctctagagaggctgcaccagtatactccccaccagcactaaatgagggtgccatttttcccattgcttttcaatcaagtgtgttatcacacattttgatcctagtcagtgtctcattgtgtttctcactcttataatgaggaaacatctttccataagtgtaagaaccatgtgtagtttcatttctataaactgtttatagcctttgcttttttttccctattgagtaattaatctttttcttattgatttgtaggaactacttacatattacagaaattagccctctgtgatacaagttgcagatatattttctctcttaatcagatttattagtcttttctttcatagtttttggactttcacttaggaaggccttcctcactccaaaattacacattaaaagcatgttttctcttttgatgtatttttctatttaaatctttcctctacctggaatttatggttatatcatgtgagagtgagggatccagctttatttttttttttcaggggctacccagttgttcggatcatttgttgaacattcattcttgctcactgacttgacctctcttctgttgctgctgtgtaacaatattatcacaaactccatgttttaacacagcacacacttacttactatgtcacagtttctgcgggccaggagcctggatacagcttagctgggctctctgaaagcctgaaatcaaagtgtcagctgaagctgcagtcttatctgagactcgactggggaaggattcaattcttagctcaggttattagcaaaattcatttccttgcagacagccagattaaaggcctcattttcttgctggctgttgactggaggccagtctcagtttcttgtcatgtgggtcctccatacagtctcttgtttcatcaaatcagcaagaaagagaaggactccagcatgatgggagctgcaatacacacatctggtcaccttccatttatggattagaaggaagttgcaagtcctgtccacattcaggggaagaggatcacacaagggcatgatgccaagaggtgaagaccatggtggggccttaagagtccacctgccatcctaggtttattttactttaaatttctatgggtatatacctgcttctgtgaccccaccaacttttaaggagtgaagccagctgcaagaagtaaatgcaatggggctgagctcatctttcctgattccctggttaggtgtggagcctaactctgtccagttgtggacttcatttcgtaagaccctttggcagctcttcactggctgaacttgatacatatgctgcctgctgacttcatgtccataatccatgtctccaggctgtgataacctaggaactgcttgggtataggacaagcttactacctgtttccatacatttggccccgaaattctgtattttattagggattatgttcatattgttaaatactacttttctggccacaccactgcttcttggtgaaatcaagtgtgtcattgcaacttgaagatgttgtcctagtagtaatagcaaacagcagtaatagcaaagctgtggagtgtttgagttgctgatggattagtgccaatctctctccctgaagaacaagagcatgcagaacaggcatctggaagaaggatggaaattctggcagctgtgttctctgcattttcgttttccccacatttccttaagtcaattttgttacctacagttcctggccaaaataatgcttccatttcctttcccaaaagtcattatagattgattgacctgtagggggtagagaactcagactctaattaaaagatgatgggttaaaggaagttaaaaaccaaaacgaaataacaaacagtataggcactggagtgcaactggtgtaatctttggtactgagctttgtaggacagagaggtataggatgatgccgtgattcatgagagaaggttggagaatggaaccttcaaatgggctgagccagagagctgcccaggaacaggagggagcactggggatttttttttttttttttttagaagaagggtgtgaagccaaaaagagttgtcagttgtgtttggatgtgctgatggtggtagagacttctgagaacaggtgagtagagcattgtgtgcccaggctcaggagaatgttcatatagaagataccctgggcaggttggggaatcagttgaagagagggaccctttttgatatcaggtaagaggagttgggctggtgaggggtggaggggtctcattttcctaggagtgtagggtgctgaaaggaaggatagggcctagttcctgaagcagaaatgtgatgatctcagagttggggaccacatggatggggtggggtgatgttggcaggaaacctgcctggtaattctttaaacttgttgtgaatgaatggcgtcatggtagaatttgaacttggaagtgtacacagttagatccttatgtcccttcataattaagacaggcatagttgtagggattagttctgtgagtccagctcttcctgagatgcagaggggtcatatcttggtgggaaaggagggtaggaggcaatatgggactttatggatgttggagctggaaagtttctccccaaaacaggtgatgagagttggctaggtggcctccgaaggagatcgtgtacaggagaggtatggaggcccaggggcaatggatgagggatgctttctggaaacacagacatagacacagtcaggaaggggatgctagtatttcctgtgtaccctcatttcctcccctcctgtgacagtgcatgaatttgacttcattcatcatgaaacttactatgttccaggcatcgtgttagtcacttgggggtactgagttgaataacacaaagtctcttctctaggagcttagtctggtgggggtggggaaggacactatgaggtgtctgagacgatgttggaatgaataagtcttccattttcaaaagagtctattttagttgaattttattatatcgcaaggtggacggtgatttaaggtgtgtgtttgtgtgtgtgtgcgtgtgtgtacacacatgtccatgcatgcatgtgtctgtgtttagctgtgttgctttggctttttatttatcttggagttctagaaatatgcatgcttacaacatatttacaaatgtggttttttgggtgttactgatttattgaaattcaagctcgaattcaataactcaccttattagaatgaaaactgcattgctcaggcatgtgttatgcctattgagtggctttcagagcctgctggaggtaggtaattcagggtggcatggtgctagctccatgctatcagggacccagctccccctcttacttggtattcctgtgctaagtacctcatggcccaagatgactgcttgaataccagccatgtcatctgaattccagttggaggaaggcagaaggcaccaagaaggatgggctccgtcttcttaaggatccttcctggaagtcacacactgaacttctgcttacatcccattggccaaaacgcagccacattttgttgcaaagaagactggagaatgtgcttaagtaaaatcaggagtctttttagtaattagaaaaggaaaacatataatggggccgggaggagtgtatgaaggggttcattatgaagggaagaggaccaaattccagaattttacttctgaaaacttcacagggctattttacagaaaatatgatcattctcccaagcagctttactagaggaataagaggtatcctgggagagtacaggtagggagaggcccaatgagacgcccgtcttaggtcctttcaagctgctataacaaaaaaccttagactgggtaatttatagacaatagaaattgatcactcacaattctctaggctgggaagtccaagatcaagtcaccagcagattccgtgtctggtgagggcgctctgcttcataggtggtcctcacatggtgggaggggaaaaaggccctttcaggcctctttcataaaggtgctaatcccattcatgacctaaccacctcctgaaggccccatctcttaacactattacattgggaattagatttaaacataagaattttggaggtacacagacgctcagaccatagcagtgccttcagatggtgggcttagggaaaacagatggtggtttcaaacctgagcccctacatcagtggtcaccgtggcagactccaggatgtggatatggatttataatagggctgcagcttcctgtgtgggttccatgggatatgctccagagtgaggcacagtggggatcttcttactgattgacaatggcttgtgattctcccaagtgatgcaaggtaagccagcttatttaaaataaccaggatgtctaattcacatttttaggaggaagggaagtaacactgaaggctgtttcccattgcatcaaaggcaaaatccaaactgtagtcgtttgtgaatggaatccctgcctgtctccagcctcacactcactcgaggtgtgcctgcctgcagtgctgcactgctcccttcagccttcgtgcagggtcatccagggcagggcagcttcatccattctgtttgtgacattgtgtaacacgacccagtacggccatcagttaaatgtgtttgctgtcgtggtagctcttcttgatgtactaaactccttgattcaagatgggctgttcctcacacatctttgggaccccagctttgctttgcttgggacatgtgattctgacccagtaccccagacctgaaggcccctctatgtgtcagtcctgaaaggattcgctgttttcttagcctcatggtctctcctaagcaggaggcattgctttacctagagcagattattgagctggaaaagacagttaataggtaaattgatcaccagctgagtccaggatagtcagctcaatgaaacattaaaattttaaacacctgcattcagagttgtttctctaacattccaagtgcttcaggtcaggggaggaaagaggagttattttagcttaaattatgcttatcctctgaggggcacagctattactatatggtttccctgaacttgggctcattttggattttgctgaatggtttacacatttttcccttattagtgaataccagaatctcagatttgcaaaggattctttaataaggctgttcgttctcagccatttgctttcatatttgagttgtttttctttccacacattgaataatgctccactccggatctgaggtgtctgcctagagtgttgctttcataaacatggtgaggaaagacaagaagaagcagacccaatctgtggaaactagcctggttgataattcaggtggtgggcaccaggaaacaggcatgtggtttttcctttgggtaccctccagccgagtagggcccgggctcctagatgggacagtgctgcattagagtttggtcacaggcttgactaggtggaagagctttctgagagttgtgtgcaaaaaaacacttagctgccgttccatatttgcttgcttgatccccttggctgctttgggactcatccaacctatgacctctctgaacttggaaaatgaagttgcagttttggccacaggatatttattgatggtggaagggtgtggaagtctctgagttgcagttgtgttgtagtatgatagagttttccttcctgaggttgaccatggcttagtccttgctatacagggtagtgtgaggattggatttctcaggttagcggagctttagacgagcgttgagactgtctgtctcagagcctctgatccatttgttttaggttgttggagtttatttgcctcttctgaagacattgggagaagccaagttaaaatcgagttaggttagttcctaggtaccatacttgaaagagaatttataagatatactgagccttgttgctccgtgttgagagatgtggtggttgatgtacctgggacaaggttgttgagccagtggcattctcctggggagggctctcctggtctcccgatttcagccaggctcacaactattctactggatatatcctcttccctttaattggccaattgtttatcaatgcggagcatcatcaagaatgttagagaaggcctgatgtctctttgctagaaatatctaaaccggctgtttaagtgttcttgtctttaaaataacaatgtgatggaaattatttaaaaatgaagccttttaattgagccttaatctccagagaagtatttttatgagatttataatgtgtttagtagctctctaatgagttcatcagtttgcataatgctgattatccaggcaattcaaagtaatttacagctatatcttcattactatgtggtagatattatccccattttattgctggggaaattgaggcttcatatagtgaaataaatgacccatggacagtcaaaccacagaaaagaattactgtgctggcattttccccttccttgataccattggctttattgggatgggcgttatacggcttattggctcctgttagggaaccgatccactggtagattagttagttggtttgagttactccttttgaaaatgaggtttctgtttctgtttatatatataaaatggaaattctagttcatttagctcccctactgtgaaggttaatgagtgtatgtgaactttgttaaagtttgggagaatgacactatgagaaatattattttattaatgagaaacttggattctgctcctgggccttgtgaaagtattttctggttttccaaatgcgaacaggtgctgataaatccttttctactcactccctgcccaacccagctgaagacttcttttataatattctccccgctagccagatgttttgaaatagcaaaattattaaataataatttgtattgttaaaacatgaatgaaatacagatatagctatgagagtttctacttagaggtcgttcttgttgccttgcagatgtgttttgatttcagccaagaacaaagatatttgatatgtcaattgcccagtgtttaggaaaaaggataattttggttactgcttttgaactagtggtgggaaccttggaaatcccccacagtctggggaccccagtttagaagctattattggggaccctcgggccactgctgaccccaggggaggcaagacttcctcgtttggattttggttttcagattggttgggggaaatctcacatacgggaagaagaagaaaaacaaatataagtaagtttccctttggggccatggtccacttacagctgtgacttggacctttcacttctatttcctaaatgctcacgtcattaggccatacttttgggaaacgtgagggcagtgggcagcgggcgggggttgggggtgggggggctgagtcagagggagggagggttttgtggtgacaaccagaactctgcaggcagagtaacttgggactataactttgctgtctgtttctcagctatgtgaccttggccatgtcacttaaccttcctggtctcagtgtcttcatttgcaaaatggaggcaataacgacctcagtgggtggctgtggggattaagtgggttaaggtttgtgaaaaacaaacaagaacaatgggggtgtccttggctgttagtattaagaacagaaaaataactcatgaatatctcagattctgatagctggtgcacacgctgatgaaaagatttgttttcagatcctcagatttttttaggagtacacttctttaatgttcatttagatggtcctgatgctgtgaccttctctttctctttagaaaaggaagtcgatttcagtagggccttctccttgcctgcagtttgccaaagtcgcattggcaggatagacttggaaatgcaagggtgcttggcatctcccatcaagttggcatttccctggctttagctttcgacaggaaccagctgtagccctgctcagcacaggctgagaacacactgtgggggtgagcgtttgggtgcttgaggcatgcttttgttgcatgttagaaaagctgtattttctgcttttggttcttccactgaaaactaaaggacgattccttcttacttggccgtgtagcctgggagtcggagctctttgggccttccatcaccagtgttgtttcctcggctgttctgggttgcagcagttagtcctacgttcagggccaagttgtgtgcctgcactcaggaacaggcactatattattaaatagttttctggagtgggtgtaacaaagtagcaagaccgagtggcttaaacaacagaaatttattgtctcacagttctggaggccagaagttctacatcaaagtgtctgcagggtttgttccatttgcaggtggtgagggagaatctgttccgtgcctttccctagctccccgtggctttctggcactctttgtcgttccttgggcagcattcccttggtctctgccttcgtcgtgacattatgttctctgtgtgtctccacatcactctctctctgtacaggtctgtctctgtgtacaaatatcccctctttatgaggacgccagtcatgttggattaggacccaccttaatgaccccattttaactcgatcacttctgtaaagatcctgtctccaaatatggccacattctgagttaactggaggttaggactccggcatactgtttttgggggacacatttcaacccataactaatatgtgctaatttgcacaaagtagcctactcatgaagccatggacttactgtgcatgcccagaaggtgtgccttttaaaaatccactcaagggcatgtctgggtagctgccacttgccccacagtctgtcatcccccttcctctcttcccatgcatgttgttgtgcagcttgaagacagctcagctctctctaaggtggccttttcttctgaattcattatacccatgtgcattccattcctttcccaaggccactgcttgtgacatttcttgtgtctgtgtttaggcctgtttgctgctttttttttttttttttttttttgagacggagtcttgctctgtcgtccaagctgcagtgcggtgtcgcaatctcaactcattacaacctctgcttcccagattcaagtgattctcctgcctcagcctcccgagttgctgggactacaggtgtgcaccaccatgcctggctaatttttgtattttcagtagaggcagggttttaccatgttggccaggctggtcttgaactcctgacctcaagtgatctacccgccttggcctcccaaggtgttgggattacaggcgtgagccaccgctcctggccagttgctgcttttgaactaatcctgggaacttgcttgattattaaatatatttgagccttatttccttacctccgtcatacacacattgaagataaggatcatatatcaaccctatattgggtgtatagattaaataaaagataccatcaaaattaattttacctgttcctttttacctgtttgtaatgtggctactagaaacattttaattacatatgtggcttgcattatatttctggtcactgctctctccccgtatccatataacaaaccgcatggacctgtttgggctatgaggctagattgaaggtttggaaggaggttggcatgcagtgctctcactggctggcttaccgttcagatggcaacacctagacccctgtaggggggtgtgtggcggtcaaggtatgtgcactcagaacttgtgaatctgaccttatttggaaaaagggtaattaagttaaggatttttatttatttatttatttgttttttagacagagtcttgctctgtcacccaggctggagtgtagtggtgcgatctcagctcactgcaacctctgcctcctaggttcaagtgattctcctgcctcggcctcctgagtagctgggattacaggtgcacgccaggctaattcttttgtatttttagtagacacggggtttcaccacgttggccaggctggcctcgaactcctgacctcaagtgatccgcctgcctcggcctcccaaagtgctgggattacaggcgtgagccactgtgcctggccaagttaagatcttgagaagaggtcatgctggattatctaaagccaatgacaaatgtccttataagaagaaaaagtttgctaatgatgaaggattttttctgcttgttgagaaatctgatgtcttcttggtgctcattaagtacttgttgaaatagattgctccatttttgggaaaacagcatgacatactgatttacctagagattttgggttcccagcaaacattttagaaagggccctcacactactaattgcaaaataaacatcttcagcctcatgtgcagctgacttatttggccagtgtttatgtttatggggaagagaaggaacatttgttgaccgcccacaatgcattaggcattttttttttcataattacttctgttaatcctcatgctaggcctgtgaagtggtttattgccctggtttatagagaagggatctgggtctcagagaggtcaactgatttgtccaaggacagacagatggagagctgggagtcccacagtctaagccactttcagcagcaagtgacttttcagcaaggaaatctttacatcaaagctaatgtgtgaaacaggtcatctgtaccgctttggttagatgggagtcgggtggggtgagctctttggttctgtgtcccttcaccaagattctcaccaagcaggctctggggctgcagagcacatttaaacttcattgttctttttgtttgtttgtttgtgagatggagtttcgctcttgttgcccaggctggagtgcaatgatgtgatcttggctcaccgcagcctccgccttccggggtcaagcgattctcctgcctcagcctcccgagtagctgggattacaggcatgcatcaccacgcctggctaatttgtatttttagtagagacggggtttctccatgttggtcaggctggtctcaaactcctgacctcaggtgatctgcccgccttggcctcccaaagcactgggattacaggcgtgagccaccgcatcctgcctgttctttttttttttttttttttccctgagacagggtcccactatgtgcagtggcatgaacatagctcactgcagcctcgaactcctgggctcaagcgattctcccacctcagcctcccaagtagcagggaactactcgtgcatgccatcatgccaggctcactttttatttacagtttttgtagagatgagctcttcctttgttgcccaggctgatctcgaactcctggcttcacgcaattcactcacctttgttccctgaagtgctgggattatgggcatcagccaacatgtcagatccattattgttcttgacttggtgcttcctgtacccttccactgtctggttctgtggattccctattgcatgtctctcttggagttagtaaatctctagcattttgagcttttccttttagacaagttaggaaatggagtagactcggggagaggatatttttgcagattccgtaaggtggtcttgctgagatggtgggactctctggccattgggatggtaggctgaaactctgccctggagccttttagtacctgggctctagtcagtctcttggtccctgagggaggcaaatgtgggagatactttggtgaattatatggtttggctgtgtccccacctaaatctcatcttgaattgtagctcccataatccctacgtgttgtgggagggatctggtgggaggtaactgaatcacgggggcaggtttttccaatgccattctcgtgatagtgaataataagtctcacaagatctgatggttttataaagagcagttcccctacacaggctctcttgcctgccaccatgtaagatgtgcctttgctcctccttcaccttccgccatgactgtgaggcctccccagccatgtggaactgtgagtccattaagcctttttttttttttaaataaattacccagtctcgggtatgtctttattagcaccgtgagaacagactaatacagtggagttcaatttatggtgtgtggaaggtgcaaaatctaggctgggttgtgcccaaggagagggcaggagacagtaccctgaggccagtctggacagatgagtatttgacgagagacttatgttgatgactttttgtgagaatgctgccgttgttcatgagagacattcatatcccaagcatttgttggatccaggaagatccagatccatctaggttaggggccacaaaaataagacaaaaatctctgcataaagggccattgggattgcaactggacagtggctgattatctctaggaagaggctgaattctgaaaacattttgtatatgcaatgccccggattggttaaaggagagataatttatttcgttttatttttgtgtctctttgatatagaagaaaagaaatgtgaacagaacttgtacaatatatggtaaattctctctaccagaatattgttgatgttcaggctccaagaattaatgtggttttatcttggaatttaacctgttatttattgtgatatgcttatgtaaggacatgtgttagataatgtgttagtcagggtaggagaggtctgtgctgtggtaacaaacttcctggaaagtttaacacatagaagcctatttttcacacaaaagcccctgcagattggatggcagtagtgggcgagggctctacctgtcttggtcactttctcctggctgattgagactccaccgtctgcaacattgccacagcaggagaagagattgcaggacctgttgttgccagctcctctgttcaccctaaaagtgatacatgtcccctttctgcacattccattgacccaaactagtcacgtggccctgcctaacctgggaaatgggaggactgtcagatgagtatcactctctgccacagatgatgcagagcacaccttttggtaattagttcattgaatctgagtaaaagctcaggcatgagtagtgttgggcccatttactagagaaaatgaagacttgagctcttcaaagtcaagggctgtatctctagatctctcacaccgggctgtctgcctcacacttttctcagcactcagcaaaggttagttgagttgaatgaatgaggcatttaaaatctgtttgagtattcgtctcattcacggggctgcttcacttagaattttgctaatgtagttgtctgcctaaagagaatattcatgcctcctgtggtggaggtgggtcaagtaccagctatgacacatttgtatatcttgttatgacacatttgtatatcttgctggcaagaaactactgaagtctgcatatttttagggatcatctttttaaagaataatttcaacttttgttttagatacaggggatacctgtgcaggtttgtaacatgagggtattgcaagatgctagggtttggggcatgattgatcccatcacccaggtagtgagcttagtacccaatacttagtttttcagcccttgccctgctcccttcctcctctgtctagcagtctccagtgtctgttgttgccatgtttatgtccatgaatacccaatatttagctctcacttataaatgagaacatacggtatttggttttctgttcctgcatgaattcacttaggataatggccaccagctgcatccatgttgctgcagaggacaagattttgttatttttatggctgtgtatgtagtagtccatggtgtatatgtaccatattttctttatcccatccattgttgatgggcacctagtttgattccatgtctttgctattgtgaatggtgctacgttgaacatacgagtgcatgtgtctttttggtggaatgatctattttcttttatatatatacctggtaatgagattgctgggtcagtcaaatggtaattttgttttaagctctttgagaaatctccaaactgcttttcacagtggctgaactagtttacattcccatcaactgtgtataagcgttccgtttgctccacagcctcaccagcatctgttgttttttgactttttaataatagtcattctgacgggtatgagatagtatctcattatggttttgatttgcatttctctaatgacatttttaaaaatatgtttcttggccacttgtatgccttcttttttgttcgtttgttttttgagacatggtctcactctgtcacccaggctggagtgcagtggcatggtcacaactcactgcagtctcaatctcgtcgggtcaagccatcctcccatcttagcctcccaattagctgggactacaggcatgcgccactatgcctgctaatttttaaattattttttgtagagatggggtctcactatgttgcccaggctggtcttgaactcctgggctcaagtgattctcccacctcaacctcccaaagtgctgagattacaggcatgagccagtgtgcctggctgtatgtcttcttttgagaagtggctgttcgtgtcttttgcccactttttaatgaggttatttgatttttgcttttcgaattaagttccttatggattctggatattagacatttgtgggatgcatagtttgtgaatattttctctcattctataggttgtttactctgttgatagtttcttttgctatgtagaagctccttagttaaattaggtcccacttgtcaattttttttttgtttttgagttggagtcttgctctatcacccaggctggagtgcagtggtgcgatcttggcccattgcaacctccacttcctgggttcaagcgattctcctgccccagcctcccaagtagctggctctacaggcacatgccaccatgccctactaattttttgtatttttagtagagttggggtttcactgtgtttgtcaggatgatctcggtctcctgacctcttgatctgctcacctcggcctcccaaagtgctgggattacaggcgtgagtcaccatgcctggccaggtcccacttgtcaatttttgtttttgttgcagttgcttttgaggacttagctataaattctttgccaagactgatgtccagaatagtatttcctacgttttcttctgggagtcttatagtttgtggtcttatatttaaatctctatcttgagttaatttttgtatatagtgaaagatgggtgttcaatttcattcttctgcttatagctagccagatatcccagcaccgtttactgaataggaagtcctttccccattgtttatttttgtcgactttgtaaaagatcagatggctgtaggtgtgcaggtttatttctgggttctctcttctgttccattggtttatgtgtctgtctttgtaccattaccatgctgttttggttcgtgtagccctatagtatagtttgaagtccagtaatgtgatgcctgcacctttgttctttttgcttaggattgctctggctctttgggctcttttttggttccatatgaattttagaattacttttctctaattctgtgggaaatgacattggtagtttgataggattagcattgaatctgtagattgctttcggcagtatggccattttaacaatgttgattattctaatccatgagcatggaaggttttgtttgtttgtttgtgtctatgatatctttcagcagtgttttgtaattctccttatagagatctttcacctgcttagttatatgtattcctaaccaaggaatatatcttggttaggtatgtattttatttgttaattttttgtggctattataaatgggattgtgttcttgatttgactctcagctagaatgttattggtgggtagaaatgctactgatttttgtacattgattttgtatcccaaaactttactgaagttgtttatcagttctgggagccttttgttggagtctttagggttctctaggtatagaatcatattgtcagtgaagagagatggcttgacatcttcttttcctatttggatgcccttcctttctttctcttgcctgattgctctgctaagacttccagggatcatctgaaaacctcataggaaaaccactctacagacacaatggcaatatttggtgcctcttagctagtagtttgggcttggggtttacttagagttatacagcctaggggcctgattcctccatttgttctctatgtgattttgacattatgttgagtctcagtttttccatcacctataaaggcatggggggtggtttgaaaatgcccagctctcagggttgccgtaaggattttatttatagtaatgttagttccctaaggctgttgtaacaaattcttaccaactgggtggtttaaaacagtggacactttactctctcacagttgtggagagagaagtttgaatcaaggtgtttgtagggctggttccatctggaggctctgagggagaatctactccatgcttctctcttagattctggtggtcaccaggaatctgtggcattccttggctggcagctgcataacttcaatctctgcctccatcttttttttttgagatggaatctcgctctgtcacccaggctggagttcagtggcgtgatctcagctaactgccacctctgtctcctgggttcaagtgattctcctgcctcagcttcctgagtagctaggattacaggtgcatgccagctaatttttgtattttttttttttagtagagatggggttttgccatgttgcccaggctggtctcgaactcctggcctcaaatgatctgcctgcctcggcctcccaaagtgctgggattacaggtgtaagccaccgtgcctggcctctgcctccatcttcacatggtattcttccctgtctgtgtccaaatttccctcttgttataaggataccactcattgcattagaactcaccttgatccagtgtgacctcttcttaaactttatatatgcaaagactctttttccaattgaggtcacattcagaggtattggaggttaggctttgaacatatctttttgggagactcagtgctaacctcagtagcatggcaaagtcctaacacagtatccacacataggtggccttcagtaaataatagtttccattgttctgctgttgtagagtgtttggcagtgcctatatggaactttctaactgaattctgcggtcttttcagaccttggaggctatcgtatcaataaaaccagagcattttctgttgtttggtaatgcacagcttctgtttgcagcatgatgctcttctaggttgcgtataagagcccccatgcatctcaattacagaatatgttaggcatttggattttgtctaacttagcctagtactgttgtgggttccttcgggcacttttgtcttgcttaacaatgcaaactagaaactgcacacaaatggttacccaaaatgagtcctgttattattgcttcttttacccctggggccccaaactgcagaaggcttattcactgcaagactctaaatgtcttacctccatatattacattccgtattatgccggaacatggtgaaattaattgcggccagccagggaagacagaaaaaaacctataatggtttatcatattttttaggctttgtgagggccataaatttaaggcatataggaattgtatttattccttagatttcacaaatttgtcatgttccttttctccaatggcgacagcttcttccaacaactgggtctctgttgctgaagtagaaaatagaaaagggagtgggcacggggatgttcctagtgtcacaggtctctgcagagctctccctcgtaagcttctttggttacatggctgttaatagctaaattattaatgcaggtttgctggtggagggagctgcttttgaccattgcctctcttcttacatcagcttttcgatagctacaattgtaggagtcacattgcatgcagagcagttcataaattgaatggttgtgtgtgtgtgtgtgtgtgtgtgtgtgtgtgtgtgttagcaggggaggctcagagttttggcctctggctgtatggctgtatgcttgtgagtatcctttgtctgaaacctgatgatgcaggaatttacatcttggaatgggagttggtttaaacaaggaaatttattcatcactgaattctcctgagagttcagcagctcctgtgagcatggaagtgcccccgtctcaatctttttggacaatgaagatgcatgttccaaaggttagatttctctgaaatgactggtttttcaagatagtaggaaagcagtattggccacagagatccaggtggctgcatgaacaagaatgcaaccttgattttatggtctttatttcgttttccaaagtcaaggtccatgagttgattaaaaatatcacaaagtgatttaactattcctcagtaatcttgtagcctattgccatcaaactttgttgacagtgacttatggaaacacattggtatgtccacacacaaatttgtgtgctggtggttcatagcagcattcataatagcctgaaagtggcaacaacccacatgttccccagtggatgaatggataaataaaatgtagtgtatctatacaatgggatattattcagccatacaaaggaacaaagttctgatacatgctacagtatgattgaaccttggaaatattatgctaaatgaaaagaagccagttacaaaagaccacatattgtatcattcaatttataggaaatgtccagaataggcaaatacatggagatagaaagtagataggtggttgcctagggctgagtgggggtttgggaggaaatagggcatggctgctaatgggcatggggtttccttttggggtgatgaaatgttctaaaattgattgtggtgatggttgcacaactctgcatataccaaaagccatagcattgtatactttcaatgggtaaattgtatagtgtgtgagttttatctcttagtcatgctgttaaagatcacatttacattgcaaacaagaacatttatataaaggtgaatcaaaacatacccttcatatctgatatattctaatttattccagtcttttccatttttttctttaaaagtgtctggacatgagccatgatactgaatccataatccacacttttatggattcctttccattttacagatttaaaaaatggcgtcccagtgcttaagaagtgagtacagggttacacaatttataaatgactgagttgagacttcagactgggtctttcttctgactcccatttcactgtgctagctaagaggttgggtagtgtttaaaaacaagttaaaagattgagcaaatttgggggtaaacaaaaaagtaccagcaaggaatagcctccttataaataccttcacctatagtgtgaattgcttagggaagctcagggcacagagaagggctggctgcacatttttgcattgagcatagtgtctgacaccctgtgcattgccctggctgagcgaggaggctccatttgtttatttttcaagcatagatgctattttctcaggactgtagagtaaaaacattagaaatttctagctgcctgccacttagggcttgctggcttctagcccttctgctgaaagtcaaatttaagataggggatcatagaaaatgaagaaaagacatacaagtcattagggagaaaagaggagctggtgttctcttgcagctctggaatcagtatcagataattgtgccctgactgcgcagtcctggccagagatacaaaaaaaaaaaaaaaaagaatttttactggagtaaatgaggagtagggagtgaggtaccagaaaagtcttgggttagcccagatgagtggtatatttttaatagggagaggattcatgagctgattcagacgtgtggccccttccagtgtctgtgagaggccatttcataagcaggtctgttttttttccaccaagttttgcttaagatttggaaagaacactctacctccttagttaattatgtgcataaatatttgcttctccaggaaggacgttttcccacgttattttaaaggactcacatagatttaaaggttttcttttctcccacccctaaggaattcagtgttggtaaatggtgcccatctcaggaacagagaagcttctgattagttaggagtccagctgtggatataggagcagagatgggaggaagaacagtcctgtacttcagcagggttccgggagcctaccatacctcagagataccatgggttcagttccagaccaccacaataaagtgagtcacatgaactttttggtttcctagtatatataaaagtgatcaggaggctgaggcaggagaatggcatgaacccaggaggcagagcttgcagtgagccgagatagtgccactgcactccagcctgggggacagagagagactttgtctcaaaaaaaaaaaaaaaaaaaaaaaaaaaaagtgatgtttacactatattgtagtctattaagtgtacaatagcattatatctaaaaaaaagtatataccttaattaaaaatactttattgctagaaagtgctaatgaacatctagccttcagtcagttttaatgttttttgttggtataggatcttgcctcagtgttgatggttgctgactgatcagtgtagtggttgctgaaggttggggtggctgtggcattttcttaaaataagattacaatgaagtttaccacatcaatggactcttcctttcatgaaagacttctctgtagcacgcaatgcctgttttatagcactttatgcgcagaacaacttctttcaaaattggagtcagtcttctcaaaccctgccactgctttgccagctgtttatggaatattctaaatccttgtcatttcaacagtgttcatagcatctccatcaggactagattccatctcaagaagccactttgtttgctcatctgtaagaagcagctcctcatccattaaatttgttcctgagattgcatcaattcagtcacatctttaggctccacttctaattctagttcttttgctctttccactacatctgcagttactcccctgactgaagtcttgaacacctaaaagtcatttgtgagggttggaatcagtttcctccaaactcctgttgatgttgatattttgacctcccacgaatcacagatgttcttaatgtcatctgaaatggtgaatcctttccagaaggttttgaatttacttggcccatatccatcaaaggaatcagtatcaatggcagatatagccttaaaaatgtatttcctaaataagacttgaaagttggaatgactctttgatccctgggctgcagaatggatgttgtgttagcaggcattaaaaatcattaatcttcttgaatgtctccaacagagcttgtgggtaaccagatgcattgctactgagcagtaatattttgaaaggaatcttttcctgagcagtaggtctcaacagtgtgcttaaaatattcagtaaaccatgctataaacagatgcactgtcatccaggctttgttgttccatttacagagtgcaggcaggttagagttagcataatttttaaaggctccaggattttcagaaaagtaaatgagtattcacttcagcttgaagtcaccagctgcattagctcttaacaagacagttagcctgtcctgtgaaatttgaagccaggcattgacttattctgtctagatatgaaagtcctggatggcatcttcttccaaaagaaggctgttccatctacattgaaaatctgtttttagtgtagccactgttatcagtgatcttagctatctagatcttttggataacttgctgcagcttctacatcagtatttgctgcttcatcttgtatttttatattacagagatggctgccttccacaaacctcatgaaccaatctctgctagctttaaactttccttctgcagctttctcacctcgttagcattctagaattgaagagttagagccttgccctggattaggctgtggcttaagggaatgctatggctggtttgatttttctctccagaccgctaaaacttcctccatatcagcaataaggctgttttgctttcttatcatttgtgtgttcattggagtaacacttttaatttcctttaagaacttttcctttgcattcataatttggctaagtgtttggcccaagaggcctggctttcttcctgtcttggctttcgacatgccttcctcactaagcttaaccatttctagcttttgatttaaagtgagagatgtacaacgctttcttcctcttgaacacttagaggccatggtaggattattaactggcctaattccattattgttgcgtctcaaggaatagggaggcccgaggagaggtaaagaaattggggaacggcctgatggtggggtagtaagagctcatgtatttattgatgaagttgttgtcttatatgggtgtggtttgaggtgccccaaaatgtttgcaatgataacatcaaagatcactgatcacaggtcaccagaacagatataataataataaaaaagtttgagatattatgagaattcccaaaatgtgatacaaacacatgaagtggcacacgaggttggaaaaatagtgctggtagacttactgcgttcaggattgccatagaccttcagtttgtgaaaaatataatacttatgaagctcaataaagtgaagcacagcaaaatgagatttgcctgcacagtttctatatcgagtggaggtctgttctttagatcaataattgatgttctcacctgattgagagggccaggagcaaggaccatgatgaagggaatcaaagccacaaatataaatcataatgagtaaaacaataacagttaactgtttttggttaaatgtgccagcccctgtgcacagtgtgggttgtctcatccaaattcttccaacatctcagtacagtaggtacgatattgccaaactttggcagacctggttcaagtctggactcctccatgcagctttgggaatgggttaaccatgtacctttgggaatatagtgtctgcctttctaagccttagtttctcatgtcaaacaaggacagtgatgtccttgcctcatggaatgatggatggctgaaaataaagtaatacacatacagcacttggcatacaaaatgggccataaaatgatggctatttttatgattaggtggaaacttttgtttcttttttttagttgtcaaatgatcctttattgaaatgttttcctttgtgcttcttaactagctggggattctacctgcaccactgttgatgtcatgaagtggcagccatcagcattgcagctcacagactgggcagttcccaggatctctttagtggtttcagagagttctctggctaaagatcagtgccacatctgtgaagcaatgttgacaatctcatcaaaagtgatatttccattgtgtttaatgtttttctgtttctttccatctctttgtggttccttgagggctttgcagaaacccttctggcagtggcagatggtaccacctcactctgggtctgttctgaatggtcagtttcactataatccttagacccttccagtcaccggttgccttggcagtgtcatcaccaaccttttttgcagacatacccagagggccaatcttgggggccagcacagacatggcatcaactttatccaaggtacacctcaggtatacgactttgatcttgttggggttgaacttcagtggtgtgctggaggcagctggtgtcagatgaacctggattcaggatgacccaataaagttgcaccttggcctcctccaagccgaaagccaaaagtggagactattcttattcctattttacagatcaggaaagtgaggcttaactagattatgaattcaagggtcacagctgcaaagtggtggggctgggactggagttcaggtctgtcggactctggcctcctgtcttttcgctgtcatctgataattggctgaagatgtcgggtttctagaagaggctgtggcgagggcactgggcctttgctgccttttcagattggacggtcttctctagaagggagttgactcagccaggtggcagccagggacagggtcagggcgttcactggaggagggtgcttgcaccacctgttaacatgggactcccccaggtgttgtctttcatttcctttttctctaaccctgggattactgaggctgaggaggtgtttaccacctcctttttaaagggggaactctgagctgatttttggtagtgcaaatttcctagtcatatgctttcaatatgtgtttgttttttgttcttgttgtctgtcagagattatcatctgttgtggcagagaaaggcatttttcctcctccctcttctctgatgcttgcaaacgctcctagtggccaatgaacattggatgcacccatgaagtagaatccacacatttaattctagattgattctctgaggccttccctgccaggctcctttcagccaagcatattcaccctttgtcaggcttgtgtgctcagctatgtgaaatgctcagagcctgttgggcaggctgatctaaacaaacaaacaaacaatcaaacaacaaaacaaaaaacagtcctagaatgaacctctggagaggagtatcctggattcacttggaaaatatcctctgtggttccagggaggtcaaagatgtgagcccaggggtctgtggtttatgaaggttgcagatctctaattagggtcttggtctgatggctccaggaatcctctggattcggagtagtaatagtaatagcactttaaagtaggctcattactagagcggttattgcttttgttcgaaatggcccatctaagtcaggccctattaaatagagcaatttaactgacacttagcgtctttagggagataaattatcctttggcctggtcacctccactttgaaatttgatcattggtatgagtcctgggagagtcgttcaggcagatgcatttgttcatgtaagcccacatttcagtcattcgttcaggacacatttaatgagggccaactctatacctgacactgtgtaaagccctggatgtgtgataacaatgaagaggacatgggctctgcttttaaggagctcacagcttttattcagtcacgaaacatcgattgggcacctactgtgtgcaaaaagccctgtgcttggtattgcacgggagacaggttagtggcagaatgtgtgtgttcatggggcctttatgatctgtgtagagaacagacttacaatcagttaactgggtgcagcctagaaccgaatgtatgttataaaagaggtgcaggaaagtgctgcgaccctgaggatgcagaggttccttcagttggttggactggagtagcctcatggtagtggtggcattactgatccttgaagaatgtcctctctgttgagagtcagccagattacccggagaaacggcgtttaaagcaggactgctccaggggcctggctgcagccacaagcctctccagaaccgagcctgcccctcctcatctctcctgctgcctgcagattcactccttcttggtgttcttggcttctcattggaggcggctgcgttctcatcctacccactactttctccaggcttcatgtccacgacctgcccaatcccaagtctccctcacgctcttccattcagctcctttggctaacccaaagtgcactaattctgaagacccaaagggaggggtgtatcacctctttgtcttttctggagctccacgtgtgtcactggcctcctggaaatctcctgttggatcaaaggccccctgtggtgctgtcagccatggcagggtcctccccaagggatgatggtgacctactcatgagggccccaggcctagtaatatccaggcagggtgatccttgcatcctgtggatgcaacattattgctcagagaaggtctctgcctgtgcccatggagacatttacaaggatgctcattgcaggtctgtctgcagtggtaaacattggaaatggcctcattatccatctcaggggactgggtaaataaattacggtactactatgaagtggaatgctatccagcaacgaaaatgaataggctagatcctcacacatcgatgcagataaatctctaaggagactttagagtaggtaaaaggaaggatctatatggtataatgccacttgagtttattttaaaagcacacaaaactctgtgtatgtgtgtatgtacatattatatagcatatatttttgtatatatgtgtaatatatgtatacatgctatatactatatagtgtaatatatgtatatataatatataacatatataatataaatacacaccatgtatagtgttttatgtctgtacacacatacacacacagttgaaatgtatgtggtaaaagtagaaaatgagttgtaaagcagatacacactgggattgtggttaaaatgggaaaggaacaaagagaaaggaagatgggtgagagggtcttttcaaccatccatctcagtaatattttattacttaaaaaagataggaaatgatggcagaatactaaaatttatgaatttggggtctggttccatgagcatttattatgttaactatatttctttatatgtgtgaaatatttaatgctgttaaacggtatgtctagagaatgggaggttgtttggggtgtctggaacttagtttgttgggaggaaatatcctggatgatgaaagtaggaaggcaggtggaaccttggtcatgcaggccatgagtcttcaagctggggcgcgtgacatggagatggtgacatgacccatcctcggtgtgggaagggctggagagggaaggagcttgggggccaggaggctggataggaggctgctgtagtggttccagcagagtgggttgagagccagaggtgggcgggtaggggatgcttcagagggtccccagggaagcagagacacgtgggaaggatgggaaatgtgtggttagattctgcaggagtccctagcactgagtccttcacactcaaggagtgttggctgttgaagtggtagaactggtttacccataccttgagggttgtgtgttctctctattcagtggtactttctttcgcaggaaagtgcctggaaaaatagatgacagccagaaagagagcttggagaaaaaaatgactccaaggagaaggtggtcatttcctagagtctggcttgtcagttgtaagtctgtattctgtttttgtttttattatacttttaagttttagggtacatgtgcacaacgtgcaggttagttacatatgtatacatgtgccatgttggtgtgccgcacccattaactcgtcatttaacattaggtatatctcctaatgctatccctccccgctcccccaagtctgtgttcttgatatgtaaaatatctattatatttccaaagtacaaactaggatgacacttattacagaaagattctgtagaggaattctttattgagctccatgtatgtttacctgagtagtttctttataaaaaaatcttttaatctaataatttgggtgaaatggttgcttcagaatcaaagctcaacctactttgacttactgtttggcagtttgtttctgtggtggtctttaacctcccctacaatcgtaaaaaataaaaaagggcttttgttgctgtttttattgttctttgttttagaaaatacagttggaaagaagaaaataaaaatcaccagtaatcctatcattcagaaaatgttggcatagtattctttcagttatattgtatacgtgtgtgtgtgtgtgtgtgtgtgtgtgtgtgcacataatttgtaacgttctttttaaattttatatacagcggacatttttctattcattaaaagcatttctaacttggttttcactcagacttttttaccccaactcttttggttagtatagttttaaaattattagctttattttttgtcgtttatgttgttgaaaacaataggcttttaggttacttgagacccagtgagcagctctgttctaatattaattaacatttacaaaacacaaagggccccttttgctggggctcctcgtctaggggggttgctttcgcatttcttctaaaccagttttaattgctgtattgaattgaatccagtagatgttccataagttatttaactactccctgcttttgggctttgtgttgtttccaggtttttgttgttacaaacatcactgtgaatgacaggtttgtagctattactagcatacacttaacagtcattcctgttgatcagaaaaatccccagaaattccacatccctttgttcctccagagttgaatggcttgcagcagagacagctgcctggcactggccccgtaggtcaggagcctggagctcactgctttgtgcatgtgttgtcactccttcctgtgtcgtcctcatcatcccttcaacgactagagtcagagctggtgttgcatgattctgttcctgtgactgtcctgcctggagaggagcacgtgcgatcatctcaaaggccccattgataccctcagctaacatcatctcccggtgctttttctaactctggcttatcttaccagccacccagggtcacactaggtcttcatcaggcccgtcctggactggggagggtccactggaacctcacttggctttaggacagtgagtgtcatcgaactggacaaggtcagaggaagtcagaaatgttattcctgataaatagcttgcaaaaatgattttagcctggcttgcttcactggagaagggcccctttggcacacctaccacattgcttcccactttccagtagaaaagaattagagatggactgcctaaataataaggtggcatttatgccatagaagctcacaggcatcctacaaatggaatatgtaagaacagctatttcccgtacaacagtgcccattttatcccttagctttctggcatatagagtaaccttgcatgtgttattacgttatcatcacattttgttagggaaaaccgtacacatttccaattaagacaaagaatgtgcaatttcctgaagtcaggattgaggtcataactttgagtgctcaagaattccaagtttaattaagccaccaaatgctgttgataaagagaaaatgccctatcaatatcagaggtgatgagagggtgatctggctgtgacaggtcactcttctaatggccaagcctgatcttacctggcctggctggtgcaggaagtatctcctattagagtgagtgtgtgtcacatctggaagctgccaggttctgttctaatacccttttctgtttcagtagagactacacacagattttgccactgtgaatggggtgtgttgcttttcttccatattaactgtattttctcagcctttcctgttgaagcctgagtcctttcagtcaggaggcctgtgagcttccaagctgagtggacttggagggaaagtgagagaatgttgatagggtcttacagcaaaaatgagccctgtgacatcctgtctcttggaagggttggaatgcttttgtccctgttctaaagagtcactctccagggacagagcatcatgttagttcagcttagattacatgatctccctttggctagaaagggtagaacctctgcctatggtcctactacattatagccactgagaaagtgataattcaaataaagtagaaggagaatggatgttgtattagtccgttttcacattgctataaagaaccacctgagactgggtaatttatgaagaaaagaggtttagttgactcacagttccataggtttaacagaaagcatggctgggaggcctcaggaagcttacaatcatggtggaaggcgaaggggaagcaagcaccttattcacatggtggcaggagggagagagagagagtgaagggggaagtgccacacacttttaaaccatcagatctcatgagaactcactgtcacaaaaacagcaaaggggaaatctgccccatgatccagtcacttcccaccaggcctctcctccaatatgacatgagacttgggtgggggcacacatccaaaccaaattattgcacccgtgacccctcccaaatatcatgtccttttcacattgcaaaatacaattatctcttctcaacagtcccctagtcttatttcagcattaactcagaagttcacagttcaaagtcttatctgagacaaagtaaatcccttctgcctatgagcctgtaaaatcaaaatcaagttaattacttccaagatacaatggggatacaggtattgggtgaatgcttttgtttcaagtgggggaaattggctgaaaaaatggggctgtagtccccacacaagtctgaaacccagcagggcagtcattaaatcttaaagctccaaaatgatcccctttgactccatgtctcacatccagggcacaccgatgcaaaaggtgggctctcaaggccttgggcatctctgcttctgtgagtctgcagggtacagcccccatgacagctttcacaggctggcattgagtgcctgtggcttttccaggtgcatagtgcaagcaatcagtggatctacattctggggtctgaataatggtgacccccttctcacagctctactaggcagtgccccagtggttactgcgtataggggctccaaccccacatttcccgtctacattgccctagtagaggttctgcatgagggctctgcccctgcagcagacttctgcctggacatccaggagtttccatacatcctctgaaatctagagagaggttcccaaacctcaactcttgccttctgtgcacccacaggtccaacaccatgtgaaagttggcaaggcttgaggcttgcaccctctgacaccacagcttgagctgtaccttggccccttttagctggagctggagtggctaggacacagggcaccacgtcccaaggctgcagagagcaactgggtcctgggccctgctcacaaaaccatttttccctcctggcctgtgatgggaggggctgctgtgaagttctctgaaatgccctggagacatttctcctgttgtcttggctattaacattcagctccattttacttatgcaaacttctgcagcagggttgaatttctttccagaaaatagggttttcttttctaccacatggccgggctgcacattttccaaacttttatgctctgcttcccttttaaatataagttccaatttcagataatctctttgttcatgcatatgagcatacacttttagaaacagccaggtcatgaatgctttgctgcttagaaatttcttctgtgagataccctaaatcatctctgtcaagttcaaagttccacagatctctagggcaggggcagaatgccaccagtctctttgctaaagcatagcaagagtgacctttactcccgttcccgataagttcctcatctccatctgagaccacctcagcccggacttcattgtccatgtcacgatcagcattttggtcaagaacattcaacaagtctctaggaagttccaaactttcccacatcttcctgccttcttctgagctctccaaactgttccaacctctgcccattacccagttcgaaagtcactttcacattttctggtatctttacagcagtgccccactcctggtacccattttctgtattagttcattttcacactcctataaagaactgccttagactgggtaatttctgaagaaaaaagggctaatttactctcaattctgcaagcttaacaagaagcatgactaggaggcctcaggcaacttaaaatcatggcagaaggtgaagggaaagcaaggaccttcttcacatggtggcaggagagagagagcgcgaagggggaagtgccacacatgtttaaagcatcagatctcatgagaacttgctatcacgagagcagcaagggggaaatccatccccatgattcagtcacctcctactaggcccctcctccaattcgacatgagatttggacagagacacaaatccaaaccatatctaagatgttgagcaacttaaacaaaaactgcgcccttgcccactatagatgcccactcgttcctcatcccacaggaaatatgggctcagagacctcaatggtgggtagcatcattgagtgttttcctctagccccagcagtttgattctgtttaatccttcttttctccctaaattatgtgggcgccatagttaccagagttacaattaattcacagattaggggaaaagccatgactttaggaagcatatggatgaattaaaatgttggcttttctactcattagctggatgctcttgacttttcccagccttggtttccttaagggtgcagtcaaggggatgagatgcctcccagagttgttctgagaattaaatggaacaggtttagtgaaagcgctgagctgtgtgccaggcacatacgaagtaggagttactgaatggatgtgtgatggtggttcaccctccccgaatcccagactgggcaccttgggctcgctgcctctccatagctgctgcagttcctagtgtttaagagtgtgggttttagagtcatacagacctgggttccatgactgtctgattatgtttccttgggcaagtttttgaactctctgagccttagttttctcctctgtaaacttagcactggttccttcctccatcacatggtggtggtgaacaatcccatgacaatgcaggatgtagatatttagctcagtgcctggtgcataaatagtgctccactgttatcacacagggtgaaattgccttatgggctcaagcccgtggattcagaccttacttctggctgcatctgccttgctccagatgtcgactattccccttcctgcaggggaagtcgcacttttagcccaagagggaggaaatggctgctccattgccaccatcctgctcaaggttcagccctactggtcccatatttgtgccttgacctgggttactctgtccccaaccccacacagtgggcctcagtgactctctcagtctgtgggggagaaagttaacaattctgattccaagagctttggaaaaatcccacctcctccagcagtcattatttatttatactttaatcttcatggattactctgagttgctcatagctttccagaaagctccgagtaagtggaagtcgtacatgcacccgaagtaattaatgcactttctactagtgagagaaggtgtaattcgcaggaatgtgtgtcaagacccaccctgctaaatttataccctgtaatttgcaatgtttgttggcactgaattggcaggttggtgagtctagcctacctgctttgcaattatatctactggccggtattgtaggattgagtaactggagagactcatcacttaagtaaattagaacctgcttctgggacccatctgagatcaccctctggtagggaggctggttaatcatgtttcctttgtgcatactggagagaatctgataaaggtgagggagggaagaggcgaaggcagtcctgaggcttgcctgagtgtggaaggaccggcggcttgggaaggcatttcttcagcagtcctcctcagccagcactctggaaaaggaaaacacaaaactgttagaacagaaatggtcttatggtccattttatgagctgcatcagccctaataatcagctctgggggagactcgtgttagtttttaaaactagaagtcactttgcagcctctgcagaccagtgattttagtacagtcctcgtaaattttctttctgaggggaaactggcaggagaatccgataggctgcaatgtaagcttgtagttcaggtgctgggaagcgggtgtgagatggttggatttttccatggctatgtttttgtggccagataaaagaattgagtgaagatgaaataaagtttaggcagacccaacccttgtagaaatcccagacactcagtttactccacgtgacctctggtggactgttcagcctacctgagtggcctcttctcctttgtggaagggagcaaatgagtcttttgattaaagttgttataaatattagatgcttgtaaaggctccggcacatggagaatacccaataaatggtagttatcattagggccatttttatgtgaggagggcatattatttgtcatttgtaaagaacacttggggacgcaaaccaggcagaatgggtaaacaaattgggtaaaatcctatattttttcaaaaagccatttgaatgtgcacctgaggcctgaaaatgtggattagatacagattgtgctttgatgagagtgcagttgtacctcaaggaaagcctcctccatcccaactccagggttcatggaagacggtagcattcctatttggtgttgggacctcttcaaggcttgagaaaatataaggaggaatttagaatctggggagagggatcctttctcccaggagtttgttggggtcaagaaacgtaactttaaatgctcctattgcaagattgggtttgtcgatacacaggcaattctttgggtgttccagtcctatggggtgagaaagaatgaatatatatattttttatctgtctctgtatgtgcctgtgtcaattcctagtaaatatttatgggctggcaagttgcaactgggaaaggcccatgtttaactggctaaatattaataagcatattcaagagaactgaggtctttgttttgtcttcttaagaaatgaatccgctcttattcactgtgtattcacaggaaactgtgctgttcagggaagaagtactgccttgttttccttgtaggctttccagcttggatttcgatttccactgaggccttatttttaaaaacatgtttttacagcagcattacaactgtggagattatagcagtctcctacagctttggttatgaaaataatatatatcgtctttttattccctttaattgaccattctcttaccttcctttgtctccacatggagacacggctagatatctccctcctttgtatttttttctctcttctccaacactctgagatcaaggcccaagtaagtacacaccttcacttttatcctggtttcctggtatccagtgaaatggatttcatactgctgaaatgtccatcctttccccaactcatatctgtggctacttctacctttctcttcctggaactttcctgaagagttaatttccttatcttggcagtgcttcccaggaaactcccttttttgctctgagacagaccttttaatagtattaaatcaaatgcttccaaaccatagtttagaccccctgctctgggagcagtcatcataggcagggctttgatgaactccctttgcaggatctggttgtctatcctggtcacctggatttacaaaaggctaagaatagcattggagaagacagtcctgtattatttttcacttacatacctgaaaaattagtttctatccgaatagaaatggatttccacccagccagaggtttatgctgaaagatgtaaagtggaattgggaagataaaattagactctttaggaaagaatgggtttcccacctccactataatcactgtcatgcacccttataagtggattgggtgttgctgaaatgcaaatgccattcgttctgttgctgatttgcttaccgaaagttgcagaaattcaatccatgcagaaaattctatgagtcacttcatttcctgcaacattttttttccattattcatattatggaaaagagcacatcaaaaaggcaggtctgcaaataacacagttttcaaaaagattgttttatttttcttacgaagaagttttccagaaatctgtaaccagtatcaggaattctccagctttgtatacatagccactcatgatcggattctactccttgcttttatcttgcttgttgtctttggggttttgaagatttgaaggaaactggtcagaattattgacaaagtgctcaggcctcaaaaaatactatcagaataagggactgaagaatataacctactttattgtgtttgtgtctggagtatctgagtgttaaaatttgaagcccagggtagctctctgtattgcttgttacattttaggattgcttgccccttgctccaatggtgcaggcagaagaaatgcaaacaaagtacagcattagccttagcaaaacatataactaggacagtggatctgctgccaaaaataccatctgctgttttccaaagccagagatggatgacttgagttgtctctgccttcagcaaatagtcaagagactaaatagatttatttactttaagtttgcccagcccttcataatatttcttattagaagaagaatatattttggaattagtgaagatagacccaactctttgattcccaaatggatgcctaaaaatttccaatagcttccaaattggattttcttattacttttctttcccatctctttctacatagggctgccaggttaacctacctgaagcattactcatctcatgtcactcccttgctcaaaaacggatgatgttggcttctccttgtgtataaagttaagtccaagttctatagtctggcacttaaagcttttcccacccttatatcctcctctccatgaccatttgctttcatgcctccatttagctcagcgtttcatttggaatagaggtctgcatcatacccaacctgcaaagcggcctgggtggaaattattccatgcagcattccatgatgcttcccctggaataaatttccccctccttagaaattcttttttttttgaaatggagtttcgctcttgttgcctaggctggagtgtgatggtgcgatcttggctcactgcaacctctgcttccgagattcaagcaattctcctgcctcagcctcctgagtagctgggattgcaggcatgcaccaccaagcctggctgattttgtatttttagtagagatggggtttctccatgttggtcaggctggtctcgaactcctaacctcaggtgatctgcctgccttggcctcccaaagtgctgcaattacaggcgtgagccaccgcacccagcccctcttagtaattcttacattccatttcttactttcttctgtggcatttatgacttccaacttttataattataaaataattttaattttatagctctttaggtgcacacttcttctctcctgctcaatagtaggtttttgatgtgctcaagtcttgtattccctgcaaccttgagtatagtaggtgtctaatgctttctttttgggtaaatgaatgaatcagttagttgaatgagtgcttactacaaaacagagcatgcgataggcagcgggtatctattaaatataaatatcttgttccatggccccaatcagtgaaaaatgtcattgttgaggaggtcactggctaggaattttagaagtgagaacacagtggtcattgctgtagtctagatttgggtggtccttcaacacttcagatgtataattaatttgggatttgtgtatcaaaagttctgctaccttttaatactcaataatactgatattataacctttgaaagggtggagagagaaccataagcaattgtaacttatgtattcttcatcaacaggtctattctgctattttggggacatagcagaggtcagttggaaagagatttagcgagccagttagagcctgatttgcatgctagttctcattacctggcttgtcatcttgaacctcaatttcctcatctggaaaatgggtataagtagctacccgatgcagtgtggattaaatgacaaacagaaagcaccagtgcaggctctaacacatagtgggtgctccacgaatgcaggcatcacgtctaagggaagtctgagtggcggcctgtcaccagcatcatgactgtttgacttcatagtctaactgcatgactgtggggaagaaggcaggcacggtcatagaagtttgctattttcttcgaaagtgatttcttactattgattttaatcagtttagattgttgttcttctatattctaaagtctctaggggttaggaattctgattaatatattctatagtagtctccccttatcttcggggggtacatttcaagacccccagtggatgcctgaaaccgaatatagtaccaaattgctgtcaactggaacctatttctgtccatgtgttccacctacaaatttaatgcctttccatcctaactaagcacttatcacacactctggctataacttttgcagtttgaggtgtgacagcaaaactagcacaaattctttttccttcttcacaatttcacagatagaaaattttttctcactgtacatcttagcaacctcagcataagttttttttcctttccttactaagtcgagaactttcaccttttcacttaaaggaagcactttacagcttctctttggcatacctgaattaccagcatcattcttcttgtgctttggggccattattaaataaaattggttactgaaacacaaacattgcaagacagaggcagttgatctgataactgagaccgttcttaagtgactaataggcagatagtgtagacagtgtgtgtatgctggacaaagggaagattcatatcctgggcaggacagagcaggacgacacgagatttcatcacaccgctcagaattggaccacaattcagaacttatgaatggtttatttttggaattttccattaatattttcagaagtccattgactgagggtaactgaaactgcaaaaaacgaaactgcagaaaagggaggactattgtatttcaagatgtgaacttctgggaattttaaaactggaaaaaagctggatggaaaagttgaaaagaaaaaagtcagatgtttgggagcagaggttggaaatttatgcagtttcaattctatttccattatacttctaaagttaccgttaattttgaaatataaaaaatgtccattttgtataaatcagcttgcccaaaggtattatatttggtatatttagagatagaaatgctgttccttatttgtacaggcaacctgagaaatattttgttttccaaatatcgctgagtgttcttatctcttgtcctttgagcagtactgaggataatgcctgattcataagggcagttgggtaataatacatttttttctgaaattgtgtgcttattagcagggcttcttagcctctcagcagtttgctgatgcaaagggactttgaaggaatgatgtctgtttcttcttcttctttttttttactttaagttccgagatacatgtgcagaatgtgcaggtttgttacataggtatacatgtgccatggtggtttgctgcacctgtctacccattgtctaggttttaagccctgcatacattaggtatttgtcctgatgctctccctccccttgccccccacccccctacaggcccctgtgtgtgatattcccttccctgtgtccatgtgttctcattgttcaactcccacttatgagtgagaacatgtggtgtttggttttctgttcctgtgttagtttgccgagagtgatggcttccagcttgatccatgtccctgcaaaggacatgaactcattcttttttatggctgcatagtattccatggtatatatgtgccatattttctttaggagtgatgtctatttctttggatggtgttttacaaagtctgtttccttttcttctcaggagtttgcaaacccccaggggagtgtgcctgagttttttccttctctctagctggggtgattgacagtggctgttacagatgccttgaaatctttctgcctcccatccaccagttttgctgctgccccatagataagtgttgtccgctaggatcaggaagacattggtggagagctaaggtaaggcaggctttgcaggcacacccccttttttttcctcaaaaagatactttataaaaaagtcttcagttggttctttcttttgaaacctttcctcctgtggtttttggttgtgtgtcctgttgctgaactgtgggcctgtgattcttgggcctggcaagtgtgtgctgaggtgttccttccacgcctccctgttcttggaggctgagctttgagcagacctttgcgtgtttacacaagtttgggatttttactggggttggagaggtgtctggagatggagttgctctgggcagaagtttgaacagaagctgttttgtgggaacacaagaagctgatctgagaaagagagacagacagatagacagagagaggggtgcatgaccggcatggagctgtgtactaaatacaaaggaatggtattaccagcctaggctttaatgaaaatgctgtgtaacaccattatgggaaatgataacttctgttgtgcccaaggaatggaagcggctggaagggtgcagtatgggatgtgcatggtacctgcagtgatggtaacgcctggagtgctcttaaagtcacaactccccttggctgggtggcccatcacacctgctccctcctttcccgcctgccatggggaggtggcagaaactttgctggcgaggtgaaatcagccttcctctcccagggttcagactccttcctgaacatctatctgggcagtggtgatgacagggcagtgcctttttgaaagaattattacggcagaaaagaggaagaaagccaggttcagacatctcccttggctgcaggcagaaatcagcattcagttgtctaatctgtagactcatcaaacataaattattctggattgcttttctctctgtatagcttgctataaactttatgatttatttttattttattttttgccaaagacaaataaaaaatgtttaaacaaaagaaggggggagcccccagacgaaccatgtggaaaagttcagtgaagaaccccctaggattcctgataaccaagaataatcccagaagagtttggaaagtgagttggattgtaactggagctggaattggcttccagggcagtcccctactccctgttcagattcattttggaactgaagcgacagcagccatgtagacttttctgcatgcatcccagagtctggctgttaagccgagcttcagtagatgccaccgcagagccttgcgccaggtctgagaagtttgcatgcttggggtttatcagggtgtggctcgtgccattttgggcattgcagaaaaggagtggggctgttttgagtattcagagaaaatgagtgaatcaattaaaaataaatccgggacatgccattcccccccccgccccctgcccccattgcctgtccccgtccccaccccttgtcattgcattgtgaactcttggacttgatagtgaggttgctggttgctcaggctgtagaaggaagaaaggagaggaatggtgtctataagccagctgtgctgttcaaaaacatgttttttactttttatttaagtaaactttttatagaaacttaacgcacataccgaagagcgcgcagatgttaactggggagctctatgaatttccatgaagtaaacacacctggggaaccagggcttagctcaagaagtacagcattgccaaccccagagccccggtggtgcccccactccatcctccccctgccccccgccactgttctgacttccaacatcacagattcctttcttctgtttttgaactggcaagaatgtctggctccttttactccacgttaaaaagatctagtttccacctcatcttccaggaggtgggttgtaggataaccctccacccacttgggttgcaaggacaactccaaaaccttggcgacccgacctcccacaagccttgggctccagactccagcactcttgttccaggcgcccttgaatgagctcgtctgttttccagcagaaatcgtggcctgatgccacctggaagacccagtagcatggaaataggagtccagagcaggctgtaagtgtgagctcacagggagggcaagtgagatttggagagacctgccacattccccgcagaggacgaatgacgtttacatcccttaatcagagtcagaggcatcccacccaggcaactgaggtgtgggcctcttgtggggagtggggctggccagaagggaggggagaagtgtggctgtggaaggtggctcataagagcttttatagaatacacttgtgttctaaaagggaataaaaggaaacatagcccttgggtcattttctatgctaactcattaataagcagtcacccacaggtttctccaagtgattccttgttcagtttttctttttagtttgagccaacatttgggactattagtttctgactgtatcaagtactcttatcccaaacttacttctcttgtgctttaaggaatgcttcatgaaaatattttgtaatttggtgagtaagatgactgtttccttttgggttttgtttcttaatgttaaaggaacaaatctttctctgtgtgtatgtatttttacaatgagcagcgctatgccacctctcccctaaatcatcttggccgctttcgtaagttctccaggcatatttactatggtgacactttaagcaattggttctgaagaaaagatgccaatagaaaatatacccacattctaaaaggacctctcagttccttccctgcagagtgtgtgttctaagattgtgcagatataaatgtaaataccagtacactatacatctacatctctagcgatgaacaaacatgggattctgctatacatattgttttccaacttgctctttcccttctgactctattgtggctattcttccgtgtcagtacgttctaactcctgaattctttttaaaggctgatgtggtagtatggctatattgcatcataggaggggacctcagaaagtttgtggaaagacataattaaaagataaaaatataaactttactcctcaacataagcttcatcaagttcaaggcactttggtaagcgatgataccaaccatttagtccatccctaaagaactgagggttctgggaatttaaccatgtcaatgtgttttttacattattaactgaagaaaaacatttgcctttgaaagatttttaggattagggaacaaaatcagaagccaagactgtaaggaggctgcctcatggcttcccattgaaattctcaaaaaattgccctgttggatgagttgaattgagcaggagcattactaggatagaggaagactctctggtgaagctttctggggcatttttctgccaaagctttggctaactttctcaaaacctctcataataagcagacattattgttctttggccttccagaaagctaacaagcaaaatagctctcaagtatcccaaaaaactgttgccatgacctttactcttgactggtcaactttcgctgtgactggactactttcacctcttggtagccattgctttgattgtgctttttcttcatgattgtactgattaagccatattttatcatctttttttttttttttgagtctcgctctgttctccaggctggagtgcattggcgtgatcttggctcactgcaacctccacctcccagattcaagcaattctagtgcctcagcctcccgagtagctgggattacagtcgtgcacccccatgccccatgactgtatttttagtagagacggggtttcaccatgttggccaggctggtctccaactcccgacctcaagtgatccacccgcttggcctcccacagtgctggaattataggcatgagccactacatctggcccatgtttcatttaatacagttcttcaaagatatgcttcaggatcttggtcccgcttgtttaaaatttccattgaaagctctgttctactgtgtagctgttctgggtgcaccagttttggcattcatcaggtagaaacttcagtttttcagtcagaattgtgtaagctgaaccagttgagatgtctgtgggttattatttctgttgtttatcatggatcctgtttaattagggcacaaacgagattaattttttcctcaaaagttgatgtggatggtctgcggctgcaggcttcatcttcaacactgtcttgccccgtcttaaaatgagttaggtgtttgtaaactgctgattttggcagggggcattgttcccataaactttttgtaaagcatcagtgatttcatcatcccttcacccaagcttcatcataaatttgatgtttgttcttgcttcagttttagcagaattcatgttgctccaataggggcttttttcaaactgatgtcttatccttcttagttcctcaagctcgatcctgttcagacatgttataacaagttagtacgagtttatttgggtacagaaaaattttaaaatccatgcataattttttcataatatgcattttcacaaactttgaagatccctttcatttacctatctcctcttatagacacttgagttctttaaagttttggacttttacaagtgatgctataaataaaaaaaacccagccttttatgtgtttctccctgcatttatatatttctaaggctagattcctagaaatacaatcagtgggtccaaaggtaagctcattataaattgtgccaggtgctgtcaaatggccctagagagatggtaccaatttatactcccaccagtagggtctgagggtgccagtttcctcaccctgccaaccctcaagagtactcatcttttcaacttttgccagtcgcattgttctaaacaatggcatttcacgtgcatttgtttacctgctagtgaggctgtgcatcttttcatttattagccatgtttattttttgtgccatgcttgttcgttttctttattcatttttttcttggtttgtttgcagttctcttaaggagttccaattagggacatagaggattgttttaaaacacacatttagaaaaaaaaatctcgatgggcatttctggctataaaactctataaaagaccaagtacttcttctttctggcattgaaggctttggttttctgctttgtttttatttaattaggtgaaatttttcctcctggctggagagtccggctgtctgtaaatgcattatcatttgtgcagcacggggtagattgtgatctgagctggaaagtgagccatgccaggcaggggttggagcctgttggagctgattatcgcgggtgttcagtgcaaagctgaatctcttgccccgtgtctcttaaaaaccatggtctctcatgttgttagcataaaggcacttgattgacaaaaggagagacagggagagtctctggagatgtgctggcactctggttcattatgtttctttattctgctggcatttcctatgtcagtcttgcttcgtgtggagccattattcctctcttcacatccaggtcatgtggagagctgccaccttccatataggtagataacctggcctcattgttcataggacaccagagcttccaggaatggggtggccaagggcctgggtcccagcacttcagtggccgttgataacagaggcaagctttcgactgaacccctttaggctccttcattcctgccagctcacccttacctctccagtagtaaagggcttgtgcctttgcctgctctgggtgagagtcccagagcacagtagcccatcacactgtgttgcagctgtcactattccctggatacagaaagaaacaaaggccaaagttagggtgctaatggtttgggattcaccatggggagaaggtgaatcaacctctctgtggatggaggactggaggcgtgactgagaggcggtctgccacccagtgcagagcagaaacagagggctgactcagagaggcgttgtcacctgctggatgcacttgggcctggctctcttcccctttaacatgtgtctgaccttgattccctgtgagctggctctgtgggcatgggtcatcacagaatgctgggtttgtctatgggcagctgtgtcagatgatgctgacagcacatgttatcacatgcaaagtccttgtgccccggagttctggaggcaagcttttacctgccaaagttgcagtatgaaggactggactacatttgaatttttactttgagccatgaagaattactggtttacactcaagctaatctggaggtaaaggttgcctcacagaaaatcctagggtccatagccttctcaggaaagaaaataataatatgaataaaaaataatatgaataaaaacatgaatttttggttcctatgcccgctcctaccttttaaaataagcaagttattatctgagcgtgaagagacatgttttagttctgtaatcttaaaatgcatgcaaatagggactgtccacaagatggaggaataatcctaatttgaaggaataatccacaaaatgtttatagtattttagcacagggaagcaactgtccatttttccctccttctttttctctctccatttcgatagacactctgttgtgggctctgggctacattagaacacattccctcctgtagtttaaaagttgttcatgagttgtcgggggaagaaaggcacccaacagaaatttgtggagcattatggtaaatgaagagatagaggtttgcataagttatgttgagaggtccgagtgggggcttgtacattgtcttgggggactagggagaaaacccctggagaggtgggctggccaggatacccagggcacctctgctgacccagggaccttgagttttacccgctgtggaatggggatttgaaacagcatgtgacgtggtcagatttgttctacagctgtgtgaaggatgcttttagaagccaagactggagccaggaaagccagtaaggaagccattagtgccaaagaggtaagagaagcatttggactagggttgtgagtgacagggatgggacatattaatgaaagcatcagttggttgatggcggtgggggtgagggagagggatggttggtggttctaccagctgagatggcgcatgatgcaggaggagcagctttagaagaaaaccccaacattctgttttggacatgctgagcttgtgccagggatggaagtatctttggcaatacggggtggaaatgtgaagccaagggtggatggaggatgtcgttgaagggaagagaactgaattggcggtgttggtttggaagttatcaccgtgaaggtccaactaatagtggacaaaatgacttaactagggaagatatcgcttgtttaagcagttgggagcaaaactctgaaggctgttaagggagggaaaggagcttccgagatgactgagaaggaatgatcagagagccaggtgtgtgttaacgggaggcagaggaagagaagaatatggtgtgagggtggccaagggaatggagtttcagaaggagggaatgatctagctgatccaaagcagcagaattgtgcctaaggaagagatggaaaattaacgtttgaattcaatgattgggaggccccctggtgactttgtgaagacagattcaggagagagtgatggtggtgggaaccggacagatggcaagggattgaagaatatgcagactgtagggtttaaaccttgttttcttttagagggggtctggctctgtctcccaggctggagtgcagtggcgtgatcttggctcactgcaacctctgcctgccgggctcaagtgatcctcccacctcagcctcctgagtagctgtgacttacaggcacatgccactgtgcctggctaatttttaattctttctttttttggtagaaatgacgtctcactatataccccaggctgatcttgaacttctaggctcaagtaatcctcctacctgagccctgcaagtgctgagattacaggcgtgagccactgtgcctggcctcaaacgtatttaaaggttaatcatggtctcagcgttcaccaggcctttgacttcttccagtgtcttgatattgagctgcccctgttagcagggagcaatggagtcacctgaagaactggacccacactgtggcgcacgttatttcaatttactgaaaaatcgtttcctaataaacagttcccttctgttctttcatctcgcctggtatgattctattgtattcagttcagggtggatccttttacacttcagatcacccttcctctaattattaatcatgtaactacattagaatgctttgtcttatgaaatgacgtgttatgtacctacattacatctagtctttatatcatagtaattctttaatcgtgaattataacacctttaagaaatgagccctagttaatcttatggccactatttgcatgctgtcataaaatgtgtgaaaaattcagaagcttctactgaattttagtatttttttttttctttaagaggttttcttgtgtgagtgatacacagtgagaattctaatgtttccaggtctgtgactactttgctccaataccaagatggacagaacagccctttgattacccagggagactgtcaagtttgcatctggtcaatctctgttttatatataaggaaactgaggcacagggtgggtaagtaattccctgagcttggaaagtaatggtaatagaattcagtgtatgggctccagggctgactcaaatgagaagggctctataatccatctttaatttttaaacttgcttcgttttctggaaggtcataagctaccttttcataggctaccctttgcaatctggaaaccccaaacaggttcgtctacacagtttcagccctttaaaacagatttaccaaacctgatagtctcttgcaaaggtaaattgcttgctcaggaggtctgaaagctgcgatcattcagacatgcatactaaagtggggactccagcagtaaacactgcttaactctggcactttctagatgtacaaacatcatttgctcaagaagtcagctaattcctcatgatggagggcctgtcgtcgtgctcaggagggagtgtgcctgtgtgagcagattgtagaagcgggatggaccagtttaatggattaagctacttaagaaaatttaaaaagactcactggttaatatgcacaccctctttgcttgacggaaacaggctggcgtttttgatctccctggcggggttgctttcccaatcagaagtgataagccaaataatcatttatttgctgagacatgatggaagattatggataattgaagtgaaccagagagaccctttaatccatagggaacgggaggtaggtgtgattcccgtccctttggagattattttctcctgttgcagggggccatggggactagccgtctcctagctgagtagagaaggtcagagttgtaaagtgcagaggccagaattgggtctcatctgggagctggagacttggattctctggctagctccagcactgccttttgatgagctggttgctctctgggttttagtctctctctattaaacaagaggaactatcttcagtacctgcctttcaaggatattttcagtccctcagaggaggagctctatgtcaatcccacttattatttttaaatgctgaagactctatctaggacaggcagatgatgtgtgtttgcctgctatggggacgattacgagtccacagaaacaaagaatgagtgggggaatttgattgtcgtctgttactgccttactttatgcatggggaaactgaggctcagggaagtgaagcaactcccccaaagcccagtggtgagtcccatatgcctttctcatttgacctgctttacagctttatagttgtttggaagggttcgttcatgtgtatagtttggctgctattaaagagatctaggaatgatttaaggagggctaattatttcttaggaataattgagctgaggccatcatgtatgagaagacacacagccagggtctgcactgggaggtctttaactgtgtccttaaaacctggtgtctggccccacaatctgcttttctggatctaagtgaccaccacgttccagctaaccagcccagattccagcaggcttcccatctgaccaggctacacccactctagagaggcaggaagagaaaagggacccagccttctctgactcagagagtcagtaagaatgtatggagggaaggaaggagtaacatatactagtaccatttattaaaccccaagtatataccacctgctctcttatatatactttatccttctgtctcttgtatgtccacattttacctatatatatgttttatatctatatctatagctatatccatatctatatctatatctatagccatatctttgtcattatttgtatctatcatccctctatccctcagcaatgctgccagggatgtggggtttcctcagttttacaaatggaaaattgaagctcagagagggtagctcacttgtctgaagttgccacagctagttatggttataagagaattaggcattagaacccaagtctggctcactcctgagctcatgctctttttaacagactgtcttcccagaagggaggacaagggattgggcttcactgtctggtttccttgccttcccccatcctgcaccctcaaaccacttcttctgtgctggccaccctggtttttgactgtgctctgtgcctttggcccttccttagttgcaaaagccagggggccctaccaagtcacagccttggctatcctcaactgagcccatctgaaccttgctcagccttctgcagccccatgttgaggggcgaggaggcagatggtgtggactattctaaggaagacagctttactgtggctttcctcaccctgacttcttagggagttagtactcaaaaaatatctgacctactggctaggccttgctatttctgtttttggaatgtcatggcttagtaagtttggtgggtaaatctatcttaggagataacatttattttttcctccacaatcagcttctgccctgcaactgttgctgcctttcagaatatgaaaagagctcataatagatggaatctcccagaagaaggtctttgcatttgctctttcttttccagtatgaatgcttgcccccttttatctcgcattcctttgtagttggtggggtttttgaagcgagaatatagtggtaaatgcttccatatgtctttcatagggttttttttcctaaaatattagtgtaatttttgttccttataataaaattttagcaatgaaacatttttttaaagggtagcgaaaagttaccaagaatagcacaaatcccgctgtgtgcctgcacccagttccactgaattctaatattttgccatgctggcttcagatttttttttttttttttgagatggagtctcgctctctctcccagtctggagtgcagtggtgtgatctcagctcactgcaagcaccgcctccagggttcacgccattctcctgcctcagcctcccgagtagctgggactataggcgcccgccaccactcccggctaattttttgtattttttagtagagacggggtttcaccctgttagccaggatgggcttgatctcctgaccttgtgatctgcccgcctcggcctcccaaagtgctgggattacaggtgtgagccaccgcgcccggcccagatttttttttaagacaaatcttgcagttgaagttcattatgtacgatcccagttgccagaggtacccatgatcctgaatttgattttttttttttttttttttttgagatggagtttcgctcttgttgcccaggctggagtgcagtggcatgatcttggctcactgcaacctctgcctcccaggttctagcgattctcctgccctatcctcctgagtagctggggttataggcatgcaccaccaagcccagctaatttttgtatttttcatagagacggggtttcaccatgttggtcaggctggtctcaaactcccgaccttagatgatctgcccgccttggcctcccaaagtgctgggattacagatgtgagccaccacacccggccctgaatttgatatttacctctcctgtacatttaaaaaatctgtatgtacccattaaaatagtattttttaaacaggatgtaggtgatattctgcagttcgctcttttcacttagcagtaagtttctcagatttacctatgttgagtgatgtaaaccctagttcatttaattgaagctctgagtagccttttcattgtgtgaatgtaccctgttttctcatccattctccttttgatgaacatttagtttgtcttacagttttgtattatagtagtgtctcactgaatgttctcttgctgtcgccctgtgcacatatacatgtttgtccctaggcctagggtatctattaggattggctgggtcaaagtgtcagaggcatttaaaccagagtgattccatcttaataggggctggataaaatgaggctgagacctactgggccacattcccgggaggttaggcattctaagtcacaggatgagataggaggtcagtagaacatacaggtcataaagacctgctgatacaacagatttcagtaaagaagccagctaaaacccaccaaaagcgagatggcgaggaacatgacctctggtcgtcctcattgctcattatatgctaattacgatgcattagcatgctaaaagacactcccacaagtgccataacagtttccaaatgccatagcaacatcaggaagttaccctatatggtctaaaatggggaggagtcctcacttccaggaattgcccacccctttcctagaaaacttatgaataatccaccctgtgtttagcatgtaatcaagaaataaccataaaaatgagcaaccagcagccattggggctgctttgcctatggagtaggcattcttttattcttttgctttcttaataaacttgctctcacgttactctggattcgccttgaattctttcttacatgagatccaagaaccctctcttggagtttgggtcgggacccttttccagtaacaaaagtgtgtgagcttcactaggagttgccaaattgctcttcagatgtgccgtgtatgagttcctgttcctccccatcttcttgccacttaagaatgtgaggcttcaaatttttgcaagttgggtgtaaaagagagccctcttgttccattaatcattctttgattacaagtgagattgagtatatattaagtggctatttgagtttcctcatcggtgaaagtacctgttcatgggctttgtccatttttctactgggctgcttgtattttcttatatcattttgtcagaaaattctagatattgatacttcgtgggttatacatgtggcagataatctttttctagtttgtggcttctctttcaactttgtttatatctattgatgattaggagtcttacattttaatgcagttgtatttatcagtcttctcctttgtggcctctcctttgagtcttatttaagaatttcttccttaccctgagctcatagagatacattttggggcctatatgaagatcattttgcttttctggccttattgcttagttggctttggtattttccttatttgccctgcctggaggcatctgcatggagcagaagagagactatcgaatggttcccagtggctgtggaaattgctgcagttgttcttgggcacaaggggctgggctgaacttgaggttgtagcaaaatccttctttttgggcagtggctgttcctgagaggtgctgaagtgcagagtcgattggctctctcataagccctggcttatcacaagccagataaaattggtcgtaaagttgtctcctccttcagtttagtggcatgcctagctcacttcctcctgctgctgctgattgagctgaaaagacagaaggcataggaggatggctcctgctctgggttctctcccaggtctgaccggcagccagcccttggcaaggacatgggtgtgagtgaaaagcaagcgcttgcaaaagttcttccagaagctcttgacttcagtgcctttactcctgggagcccagaagtgttcttcaccccaatctcatttatccattgcatattgcgtggcagattataaatggggtcaactcctgtttagataaattcacagaatttaagaatgtcagaactggaaaggttcttaaggttcaacaggttctgttgcctgttcatgcagtcaataggcatttgtggagagtcttccaggcacctggcacttgctagttgctgaggatgcagcagcaagaagacatggtgttgggagcagccagtcaacaacggggctcatttcagagtggtggatgtgatgggatagggaggatatgccttgggattggccacttctgtcattttcttattttacataagcctgtagttgtctagtgcagggagtcggttggcaaatgggctaaagtcagccatcacctgcttgtagacactcttctgaaccaggtatggcttttacatatttaaatggttgggaaaaaaatcagacatttataatatattttgataatgggaagcactaactttgaacctcaattaagtgaaatgttaattacccttcccaaaaagaattccattttttttcttagtagacctatattacagaaaattgttcccaatgattatgaaaatattttgaatttaatcaataaaaaatttgtagaatattcttttctctcctcttatataggtaccttaatttggcttcttggcctacactgcctgaaatatttactctggccatttgcagacttgttctagctgtgtgaccttgggcaagttacttcttcagtttcagtttcctcatctgcaaaatggaaatggtgcctgtttcatagggcaattgtaaggagtaaaaaggaactgaagggccgggcgcagtggctcacgcctgtaatccaagcactttgggaggccgaggcaggcggatcacagggtcaggagatcgagaccatcctggtcaatatggggaaaccccgtctctactaaaaatacaaaaaaattagctgggcgtggtggtacatgcctgtaatcccagctacttgggaggctgagacagaagaatcgcttgaacccgggaggcggaggttgcagtgagccgagatcgtgtcactgtactccagcctggcaacagagtaagactccatctcaaaacaaacaaacaaacaaacaaacaaaaactgatgttccacttctgccatgtgtatgtgtttccgtagatgtcaggtcttccctagtgaaaagtccataataattgctatcttgagggctgttaaagggagcaggaggagggatgggacaagggtggcgccaggactcagtgctcatcttggaggtcagtatcatgacaaacagcatcttccagagttgctgtcagacccccaaactgtggactttggatctcacaaaggccgtatcccgatggctctgcaaacccccactagattaacactgctgcaacataattttcctcatgaaatgcactgaagcataactaaaaaaatgtaagtagcagctatcaggcccttaatgaggctataaatacagcacgaaaataattcataaaactatttcctggtgaaaaactgtcctttacctagacctctttgcttgccccattaataacagccattggctttctttactaactcgctttgtaagaaaggaacgaagcctttatcattttgtgactcatgctgctttacccttgtaggagaaacaaccatatagctatacaaagtgcagacacctcatggcacagtaggcagctaggcccactcactatcccggtgactggctccatccatcagttgttcctgctgcagaattgcacaccatcttcttttagggtcataggcagtgtaaatatgaaatctgtggatatcaatagccaatggtcctgggctgaacccaggggtcatgttataccttctcaccaatttccctgggctgtcttccttgaacagatgggtaaatggaggctggggctactggaatgagctcacagggcagggttgcctgaagagtctagacagagctagagatctggctgtgctcaggggcttagacccagaaggcccatcttcgccccaaactcagacagccttgtgtgactcttcttggtgacagctagagtgctcctcatagtcaggctccagcaggaagcagtttgatgggaaccgaatgggaagtgcacaggacagatgtctctggttccttctgtcactgatgctactgtgtggagcaacctagagtcgaggaggtcttcagggactttctggggatgtttgtaaacagatcactgcagagccgctcactcactggcctgtgcctgtgcatggagtgtgtgtgtgtgtgtgtgtgtgtgtgtgtgtacgtttgaagaagacagtcacggaaaacagacagtggccttcagtggcctcatgacactatgtttgttggcactgggcagtggaaagaggtggttaattctctggggaggttctagacaagatccgtttgagatctgcaaaaccaaatgctaagccgtatgtgtgtctgtacctatgtatgggtgtctgtcttgcttttgctgttcattgagccttcagatccagattgtcaggaagcagaggataaaaatgaaggccactgggcagaagttggaaagcagggctgtcatggtttccagatgtcagttctagattgcatcatgacaaggggtccccctagggcaggaagaacagcagtaggagaggagagagccaggaggactccagctggtaggatggaattcccatttctcagctggaaaagtcaacatcactaactgcatgttctggagtaatttgagtggaatgcagcagctgtctgagtttttgtagttgccccagtttgggcccccttgtcaaatataaatttgtgggagccagcagttttggaagaagcttctgcagcaggctgtttgcctttgtccaatagaatgggacttgtaattttttttttttcattcttggtgcagatggtgtagttattttaagtaagtgatgtgctgcagtgaaaatgggcaactctttttcatttttcagcttaatgaaaaaaagagaagggaggaggagaaaccccagctagccaacttcgtgctaatgcttgtcttttttggattctaaatgtgtcccaaggcactaagatgggataaatatttcagccactagaaagtcctgctgtcggcctgaaaagatttctaacctcttttaaagcagactgggtagtaatttacttgtacaaatccagacacccccatgtcccttattttaactatgtatgtacagattccactcacattctagggggatgaggcaaggggcaggtggaactttctagggaagagtatgggggaaagggaggaaataaattagtgcctgaacacttggctttcttcttagagtggttataagtatttactggagacctacagagtggtcaggtgcccactgaacacagttgaacaaaacagtgcctctctgccttcacggagtgttcagtctagatggagagacagtacagacacaccagtaagcaaaagctgggttaaaggaaaacaggacactaccagcgtgaaaaacggggaccagctttagattgagtgtccatgaagggacctgaagaagtgatgtaagctgaggtctggatgaatgaggttggccaagtgtattagtttgctcgggctgctgtgaggttggtgcagaagtaattgccttgtgcattatgcagttacttctgcaccaacctaacatagcaaagtccacagactgggtggctgaaatgacagaagtttgttttcccacagtgctggaggctagaagtctgagatggaggtgcaggattagcgtcctctgaggcccctctttcttggctaatgagtggtcgtcttttccctgtgtcctcacatggtcttccctcttacatggtctctttcctgatgtcttcttagagggacatcagtcatatggaattagggcccaccctaatgccattgttttaacttcattacctctttaaagatcctcatctccaaatacagtcacattcggaggttctagggtttaggacttcaacatgtaaattttggggggacacaattgagcctgttacacagatgaaaggtaggtggaagaatgtccggggtcagcaaacagcacatctggaggcctcacagcagggggcactgagatgtgttgcaggagatggttcgaaatgaatatctagaagcaggcagcaactggaccatgctgggctttgtaaactatggccagagttttagatttattctgaggacacggagaacccatcagtgcattttaaaatctcactctgtgtgaagagaaggacctggaaggagtgagaagtgagaagtccaaaggttttttaattaagaaactaaggtttgtcaacctcagcactattgacattttcagcgggatgactcttcattgtgggggctgtcttgtgtattgcaggaggtatagcaacatctctggactctgcccattagacgccaatagcacccccatctccccatcatgacaacccaaaatgtctccagacagtgccatatgttcccaggggggcaaaattgatccctgttgaaaacccatggttgaaaagggcaagagataatggcggcttggattgggtggtgccagttgagtgatgcaaattggatgggtttgaggcaggtttttgaagacagaatcaataagatttaacctgcctttgccttagtttctcctcatgcctttttttttttagacagagttttgctcttgttgcccaggctggagtgcagtggcgtgatctcggctcactgcaacctctgcctcccgggttcaagcgattctcctgcctcagactcccaagtagctgggattacaggtgtgcaccaccacacccggctaattttgtatttttagtagagaaggggtttcaccatgttggtaggctggtctcaaactcctgacctcaagtgatccacccgcctcggcctcccaaagtgctgtgattacaggtgtgagctaccgttaccggccctcctcatgctttgagtttgatgatgtcacttccctaaagcacacggctgtgcaccagctgcatgcctaatgcggttgctcagaagagcaaaaagcatgtgcctctctgttattgttcaccaggccccaggatccctggtcctgctgagaaagcactttgagccccatggctggcaggaccacctgtgtgtaacagacatggtatttagtctctgcatccacccatccatttgtcaagtccatgtgccgccagccttattgactctcagagcaagtactttggaatctaatctggccaattttcccgctccaaaaatctgtttatcagaacaagatttcacagttgcagtgacgtttccaggggggcttgccttggaggagctaactctacaaatgcaagtgtaagtatttccaaacaaagcagaatgacccttacattccaggcccctgaagagttctctgctacagagcagttctctaacaacagagcagttgttagcaaacagctggaatgtgggggttttctgggttgagcatttgttgtctggctagtatccagtacctggctgcccttctagggtccccctcaagcccttgcctggagatggtgaattggtttcatgttcttctcagggttgttggtggctttctggagtccggtcttgagagggagtctcatattgattcttggctcggtggaacagagcatcatgattaattagggatggctgactttgcactacaataggagaaattgcagcagaataggagaaatagtagcataatacctttgcatttcctaacaatcagagctgcatgatttttgaattccatgttgttccatgctctgggctacgtcttcctgcacagagtctttgctgacactgttctctagacctgaagggtgcttactttttatctctgtgtgtctatcaacatccactgtagatgctaccctctttctcggaatcttttttgatttatttgaattttgactttatcttaaggacaccagggagccattcaatgaccttttaaagttaagaaatgattcatttggtgtttagacagatccttctggccacagaggggagagtgggttggagaggggcaagctggcaggcagggaggccaagttgggaagttgtgctgtgcagcaatccctgtaagaaagggtggctgctttggctggagtcgcaactgtggcaatggagagtcggggactggccacatataggggttgatagattgaggaggggacaagggagatttctaggattctgatgtgggcagttgggcagggtagagcccctcattgtagtttctctcctggagttctccagtgagcgatgaaagctcattttcagtaatgaaacgtgcatgtgcgttattaattctgtataatgcagcagatggtctacaagggaaattccatgcaacaaggccggtggggtgttgcttgcctgtgacggtgtccattgcaattggttgttgcccgcttgttctagttataaaatatttttagtatcaccccagtggtactatcaccagactacagaattagtgctcatctgtgtttggaaaagccaggggacacgtcagaggaaaggcgacatatttgtttgctgaagggtgtgtatggatttactgggagacccagcaggccgaagggcatccctggtaaaaagaacagcacgcataaaggatagtggcctgtaggaggatatgatgttagggatctggaaatctagagatgcttctctttggcaaggtttatgaaagagaatcagggaccttctcttctgctaccccgaggcgggtctagacatccctgttcttattttgctgtgtgtgcctttccagcctaaaggtataataagccctagcctttatctctgcatctttagaacatagcacaagtatctggtcataaatgtccagtaaatgcttatggaatgactcaggagggagctctggagttgtggtgtgctgaaggactggtcttttttttttttttcctgcttttccccaaaactcttttactcacatggctccttatctctcagccattgatcacaatggatcagactggtcagatcgatcagatcctggctcccttgaaaatctccccccagggtccactggtagatgaactcagcaccctgcccacctccaccgccacagcactggtgttctctctttgctttctagcctgagggttggctgttcgggttgggggctttggcactttatgaccatgttcagtggagttgaatctgaacttgcagcttggttctcagcttccagtaactcttgaaaggcaattccatgaccttgggaccctggtggaggttacaaatcccaagttcaagattcaatgtggccttttctacctgtgccacctcaggcaggttggttttataggtctgggctcctgtttcctagagtgaaatgatctcccggtattccttccaacttggcccaacttcaaggattctgtgattgtaagggctacagagtgtgaggcctggaaagatcttgcagttcctaatgttggagacattgggagtccagtgctcactcctgtctagaattttaatttttaaccactgctgatggccagaaaagaacatttggattttacaaccagtctttgatggagaaagaaaaaaagtcagtgaacacccattttgtgcctgacattcaagtatgtttgttccctgtatttctccatttagtcctctcagaatctctggaggtggactggggcagattattagtccatttcacagatgaggaaactgaaggtcagagaggttgagtcatctaccagaagtctcacctataccaaaccacacacctttcagttgaggggcgctgaggtccctgctgttgctgtgccgtctgacctgtcccctctctctgacagagagccagctgctccccgggaacaacttcaccaatgagtgcaacataccaggcaacttcatgtgcagcaatggacggtgcatcccgggcgcctggcagtgtgacgggctgcctgactgcttcgacaagagtgatgagaaggagtgccgtgagtggcctggccctttgctggggtggggtggcagccatcctggggcagaggggagcaggtcctgagcaggcttagaccctgcacactctgcttgctgcaagctggtggttttgtgcctcttgccagcagtcctgcttctttgctgtatctccatctcagagtcacatgctctgtgtagacacagggatcttggtggtggtggagccaacgctttgagagagcagaaggttttaccatcaggctctactaatccctaccctggagtcccatccttgccttcgctttatgtacgagccaactgagcatcccagaggttatgtggctgcagcatcttaaaaccagcaagtggcacattggacttgggaacccagggctgcctgacaccagagtccatgctggtgaccatcttacagagcaccgtggaattttcttgatgattaaatgaggcatagcatcctgccaagtattcagcatggagttgggactgaatacatagtaacgtgctttcccatccccttttctctgccgatagatatggcttgagctttgctggggacatcatcttctaatgggcaccaccaggatcaaatggttttgtgatccttcccaccccacctccttttctgccctttacctgtttcatgacgccgaaacatgcatgagatttgggttgatgatcatctacgagaaaagaggcaccggggatgtgagttgagaggggtccgtggtgtcaaatgatcctgctccctgccctgcagaggtgtatttctcttcctcttcagtttgtctctgcagagtgagcttggccatggtgccctgtgtggttgtcctcctgggtgccctggtaggtaggaagcatgactgacaagtggtgggcacagggttgtctcacaggggattgccttgagaccacatgactggacgatggttcctggctctttcatgtgctttgggcaccaggccacgtggcctgtctgacaggagaactatgtgtcctggctctgagcctgctgtctccctggaagccagctgaggaaatagctgaagacaggttaatcatttgaacttttttttttccctgaaacggagtcttgctctgtcacccggggctggagtgcagtggtgtgatcccggctcactgcaacccccacctcccgggttcaagcgattctcctgcctcagccttctgagtagctggagtacaggcacccaccaccgtgcccaactaatttttgtatttttattagagacggggttttaccatgttggccaggctggtctcaaactactgacctcatgatccgcccacctcagcctcccaaagtgctgggattacaggcatgagccactgtgcccagtcagtcatttgaatttttaacatatttctgaccagaatttggggccgagtctgttgacgcatgggaacgggcactggctttggagttcacacacctctggagcaagctgccccctctgaaactggtccttcgcccatccaaggggtcccatatccccagtgcctgctcctgcccttcagagaagtttttgggatgggaaaattgggggtgtgttatttggggagaatatttcatactgcttgttgcatatgatctttctgaattgatcactatacacactgaatttttatttttgcagaattgtttgtttgtttattgttttccagcccaggctggaatgcaatggcatgatcacagctcactgcagcctcgacctcctggactcaagtgatcctcccactttgatccccctagtagctgggaccacaggagtgcgccgtcacgcctggctaatgtatttttattttttgtagaaacagagtttcaccacgttgcccaggttgctcttgaacccctgagctcaataatccatctacctccgccttccaacgtgctgggattacagattacagatgtgagccaccaagcccggcctgcagaattattttttaaaagtattattatgtctattttagcttttctctgtttctaacatggcctcagaattactagagctataacattagtaatctgagcaaatgacatagtatgggtgagctctgtcatctgtctggttttgaggatttattaaacactgtacaagtgtgccaagttaccatttttgagatatggtgtatatttcaacttcggcacatacggattgtcgttagctgacctgggaatgtttggcacatgatcagtttctgaaagaacgcaggattaaggagttgattcctaaattgtatgcccagctttgtcaatagcagctgtgtgatattagtgcattctatggcattctgtgtcctgtcactccagtctcatgattttagaattcatgctcaaactggaagacatggtggagagcaaatgtttttaaaaaagatgttgccggcagctgcctggagctgcttggtttggtttggaacaggctcattcttggctattctccattatttttttcccctgacttcctacccttaacccccaagtgtggtggaggtttgagtggcatttatttagtcctttgagcaaaacataattaaaaaaccatgcgccccaaacatacattaacctctctctgtagcccttctttttttgtctttaaatcgtgaaaacagaacattagaaagtttagacagtagagggaaggagaaaaagtcccttttctaaaacaaattctactttcatttaaaatttctttcttttttttttttttttttagacggagtcttgcctctgtcacccaggctggaatgcagtggcgtgatctcggctcactgtaagctccgcctcccgggttcacgccattctctcgcctcagtctcccgagtagctgggactacaggcgcccgccactacgcccggctacttttttgtatttttagtagagatggggtttcaccgtgttagccaggatggtctggatctcctgacctcgtgacccgcccgcctcggcctcccaaagtgctgggattacaggcgtgagccaccgcgcccggcctaaaatttcttatatattccctttcagcctaggagtgagggtgtgagcccttgagaaggccgatttgtgtcaaaatcagagcccttcttcccccttagggggctgtgtgatcgtgggaaacttaccagaatgttctaaactttagcctttgggaggtttaaagagaattctttaacctcctggtgcctcaatttcctcctctccaaaatgggggtaataaggcttctgatacttaacagtgttgtgaaattttaacctgtatgaagcacgcagcacagtgcctgtatacagtaagtggcttgtaaacattaactgctattggttaaatctgtatcaactattttatttggtcgttgtcatggggaaatacggttcaattatctgcttttttctacttaacattagaggcccttggccacattctatattgaggattcacagttgttttgggaggctgcctaatgctctgtcaagtagtgacactgtaacttaaccatccctctatgtttcagtctcttctgtttcagtctcttctgcacttttacttctgctggtcaaaatgtttaggatcatttaaagaacttatgcataaccagacgacagaaatatacaatggtttcagccagagtcagggtggacagggctgaggtctccagggtgaccaacttgaccaccttttcaaggatgatggaaacggctgatgtggaatttctgccgccttcccggagggagggagactggttctgtgtcttgcttatgagctacaaagccctttctctgattctttggagcaactgggtacttaaggggaggtgagtgaaggtggcagtgttctcgcctcggagaggtgattacttcaagtgccctgtggagctttggcattggaaagataatacgcttcttaaaaaagagaattcttgcccttttcgaagggcaagaaagagcctggagaggtgtgtcatggtgggatatgaggcagtgagcagctcttctgtatccacagcagaggaaggatttttaccagagaggaagattttttttttttaatcgtgacggtaataagatcacatattgtaaaaattgagggcagagaaggaggaaaagcatctgtactcagatccactattggcatcctggaagttctcattcaggcttttccccagtgtaatcgccaggggtgtacagttttatattttgacattttctcatgtaacatttcaacctgttaacagtttttctgtatctccccccatttttctctttatcatttttagtgccattaacttgctataatatggtttatttacacataatttggcatttctcttctttccagttttccactatgggaaacagtgctcacttgtgaacaggagggtggacatgactttccctctgttttgagaaatttgcttaggctaaattctcagaattaaaattactgggttggagggaaggcgccttttctggctcttgacaccgactgccgacttgttttgctaaaggtttgcaccagtttgttggcaacatgtgaaaactatgactttattttagtcttggcagccctgggtaacatctttaaaaaatatttttctggttaatttaataattgaaaagttactttttttaattaaaaaaaattatctagctagattgagtgttttcccttacctctagttactagttttatttctttgtgagatacctattgatggactaatattaatttccagctgagttaagacattagattttctgcctcttgaatctgtagaagagggtcattttgggacactttgagtatatttctgttcttggttagtggagtgccctcagtgatagttttatccaaataacttaaaaataaaataaaaggaataaagataatgttttacaaaaacgaggaagctccatggaagtcctgattatgaggagagcttattagagcttcctctaggccacactatcccaggcattttacattctattgattcatttgattattgcggaagccttattagtaaccggctggtgtcatctccagatgaggaaattgagcagtagagcgattacatggagcttgcctgttggcccagaaaataagtctccataaccttcctccatcagagacccccagtgggggctttcagtctttttctctaggtatctgttaccctgctgaaatggaatcttactgctatcatgacatattatcatgtcaaacctgctttttaaaaagattctaaaaacgtcaataatggtttcttatagaaatgaatatttacatggccgttagtcctgggagtctctgaaatgttttccttgaagagactgtcctttgattagtgctcccctctgtaataaagcagcagtccaaatttccagaacccacaggggaccaggggtcaagagccttaagatctttttccagttctgtgttgattttagctgctgtctctccgtgttctaaccaagtggttgaggggatcttgaatgtttggggtcgtcttcccaaggcggttcattttcttctttggaaagttacactgattgatgtctttgactttccatgtacagacctggccctttatgtttggtgggtgtgtttggttgaggggggtgtggaggagggataaatttgaggactttgttaaatgataaaatattaatgaatctccaaatccagagatagaaaagtaggtgcaaaaatgggatttgaattttacttgcttttactgttcctgaccgtttcttgaacatgtgttattattgctctggtgtaaaggcataaatccatgagatagggttgagagggcaagtttgggcaaatgatcaccacgaaatataagagcaagaaagctggggttgagattgttcaggctccatactcttcctcttttcctttttagcatctgcctcgtcttctgcctctaggtggtgccacatatattttcttttaaacttgcactgcagggcaagtagagatgtggggaaaaagttggattctgagttatcctttaccttttctaagctttaccaggaattcagctgtttctctagggcacctaatgccggctccacacaccaaatgcctctggaaatcaggaagctttcataggatggatagagcttgctgctgcttctcttgggccgttctgtcatttctcaaagaaggggatgtgttggctgatgagctgtggcttagaaaggcaacctgtcagtcattgtgtgcagctgcagtgggctcagttctccccatcactctgtagaaagcagaactggcacaacactatcattttgggttgaattatagcccagccttcccccacaattttcctgtgttgaagtcctaacccccagtatttcagaatgtgactttatttaaagatggagttttataaaggtaaccaagtaaaaatgaagttgttaggtgggtcctaatccaatacgactggagtccttatgaaaaggggaaatttggaagcagaaatatgtacagagggaagatgatgtgaagacttggagcaagaagacagctgtctacactccaaggagagggcctggaacagatccttccatcacagcccccagagggaatcaaccctgctaacaccttgatttcagactcctggccatcagaactgtgagacagtgaattctgtggtggaagctgtccaatttgtggtacttggttatggcagccctagcaaactaatacgaccatcaaactatctcctttgtttaaaaaaaaaaaattattataggctgggcatggtggcttatgcctgtaatcccagcactttgggaggccaaggtgggcagatcgtttgagcccaagaatttgagaccagcctgggcaacatggtgaaatcctgactctactaaaaatacaaaaattagctagatgtgttggcgggagcctgtaatcccagctacttgggagactgaggcacaagatttacttgaacctgggaggtggaggttgcagtgagctgagattgtgccactgcacccaagtctgagtgacagagtgagaccgtatctcaaaacaaaccccaaaaattattatatagtgaatgatagcttcctgcagctgtctaacaggctgacgtctgcagacatcctgctttcatttttttcctttaacaatttgcaagtaagaatctcactgttatgggtcaaattgtatcttccaaaaggatataggatatgttgaaatccaaacccccggtatctcagaatgtgaccttatttggaaatgggggtccttgtggatgtaattagttaagatgaggttgtactggagtagggtgggcccttaatccaatgtgaatgttgtctttataagacgataatatgaagataggagggaagaagaccatgtgacaacagaggcagagactggagggaggcacctgcaagccaaggagtgccaaggattggctttctcgtatgagtgagatgtccggttttttttctgcatcttggttcttggcaagccactgctagccaagggctgaattccaagggccttctgaaggagttgagcctcagaaaacataactggcactctgaagggtctagagaatatcgtggtttaaagctctgtccattaaacacttcagaatgaaaagacatgctctttcacagcgcttacggtgtgcgggaaatccaagacctatgtatattagcgttgcttcttttctcattgagtcattctgtttgtatttggtttttaaatgtctcacctaattcctggcatgatcctcacttcactaaatttctttagtcttaaatgcaaaaccattaatgctatggttaagaacaggggctttgggcccagacagtactgagttctccccccagcttccatttatgacctgtgcagcccccgggcttaccatgcacctattttctcatctgtaaaatggagataatagcagtgcctatcccagagatgtgatatttcaggggtgatgttttaaacatctagtaagtgctgtgtgcaggccgtaagccagttagaaaggactggatttaaacaataggtactgtttcctggtgcagagaaggtgaagatcagctctgagtctgacatgagctaatatgaggcttgtagctggtgcctggtgtgagttaagcattcagtgaatgctagctgaccctattccctcaaacacatgtatactggtgacatttcctggccagagcaatgctgggagttattactcccctgttcccaacacctccatcctccgcttccccttcccacgcccggtcttttcttgctcttagtttgagagcctgtgccacagaaacaccttcatctgctaggccagtatctgcttttcactgtccagtcttggacacacattcatgagctcacatggaatagcttttagcttagagctccagggagccagccagatgcccaaactggtgcaaaagggaaggaaacaaacatttgaggggctgaggtgagccaggctcttgaggttgcagggaaggaagcttggaggtacctcttctgcattcagatggggacctatgtcttaatggacctgcagtgggcgcccacccccagagtggctgccatccgctgttctcagctctgctggagccctgcacaattaaacacctaagtggattttaatgacgatattttgcttcagcgctcaggcttctcagcctccatgagtatgtagtcttttccaccttcaccacactggcctgaagtcagcaccactccctatggccttcagcactgtaggcctagaacttgcaaaaattactgtcttcctgaccccctcttgccactccagatgtgctctttgtgccttgtggcctatgatgaggacagactttcagttcagatgttggaatcacagcatgaagtttgaggtgggcatctgataagcacccacctacatacagacgtttccaggttgtcaggctacacttaacatgcgtttgactgtattcaaacttttcttaaaggcccctggtagatttttgaagatgttggtaattttacactaaggggaggaagtacaaagtgctccaaatctttctggttttattagtttcctagggctgctgtaacaacataccacaaactgggtggcttagaacaacagatatttattctttcacagttctggaggctagatgtctaaggcaaggtgtcggcccggccgtggtttctctgaaggttctaggggaggatccttccttgccttgtcctcacttctactgatttgctgtctgatatactttggccactgattagctgtctgatatggtttggctctgtgtccccacccaaatctcaccttgaattgtaataaccctcatgtggtcatgggtgggacctggtgggaggtaattgaatcatgggggtgggtttttcctgtgctgttctcatgatagtgaataagtctcacgagatctgatgggtttttttttttttttcatttcaaaaaatttatttcagtagtttttgagaaacaggtggtttttggttacatggtaagttctttttaaattttattttaagttctgggatacatgtgcagaaagtgcaggtgtgttacataggtatacatgtgccatggtggtttgctgcacccatcaacctgtcatctaggttttaagacccgcgtgcattaggtatttgtcctaatgctctccctcccttcgtcccccacccccaacaggccccagtgtgtgatgttcccctccctgtgtctatgcatacccattgttcaactcccacttatgagtgagaacatgtggtgtttggttttctgttcctgtgttagtttgctgagaatgatggcttccagcttcatccatgtccctgcaaaggacatgaactcattcttttttatggctgcatagtattccatggtatatatgtgccacattttctttatccagcctgatctgatggttttatgaatgggagttcccctgtaccagctctgttgcatgccgccatgcaagacgtggctttgcttctcctttgccttctgccatgattgtgaggcctccccagccatgtggaactgagagtccaataaacctctttttctttataaattacccagtctcaggtatgtctttattagcagcatgagaacagactaatacactgtccatccttgtgttctttggcttgtagatacatcactccgtctctgcctccatcatcccatggttctctccctgtgtctctttgcttctttgtccagatttcttttttaaggacactgatcattggattaggacccaccctaatcttgtatgactttatcttaacttcattatatcagcaaagacccaatttccaaatataaggtcacattcacaggtcccagggcactgttcaacctgctacactgggtaaatattgaggaggtaaagctcccagtgaccagcagctaccaccagaggaggcctttgcaaacttagctgcctggtggtccccaagctgtgtggatgctcactgcattcacttggggaatatcgctattaattgttttacctctgcctttgtagcatggtggttatggaacaaaaccaagtgtgtcaataaagcaggaagggtgattcaaatgagaaaataaataaatatatatattttaaaagtcaggtggatgtactcttttttcttctataatctgatgccttcatttggccatttccataatgtgaggatactctaaatgctagttagtatgtatggcagtctgtgaaagttctgtgcttttagtagccctggggctggagggggctgctgtggactaagcacacagtgtcaccagctctccactctccagccctgtttgggacctgggagggctccaactgggggtcccagccagtttggactgctgtcaggttttgtttgtcctgcacaaggacactaaaaacaataattagttgtcggtgtttataaagcaagagcttgcacataaaaattagattatcaggttttcttgagaaatcagatattaggttactttttgcactcacagagaaccatgtccattctgcatctttcatgcatttcaccgtcttgatcattctaaggcctccagtgttttttaaattccgagacacacattttttccccacatttttcaatgggctaagaaaacacagtgtcctaatttaattggcagagttgtttctttcttagttgtacataaaatagtagcatgctttgcactcagtggcatcttggattcaatgaaatgcactaattttctctgattgttagcatatgatatttcagccaatggtgctgaacatttccaaacagataaatgcaccatgtgtgtatgttttcctttggatgctgtgcttagagggtagcagacagggtgcaaagtgagaaggacctggctctgcacccaacactgccagtattgaatcctgactccatcatctgggagctgtgcaacctacgcaaggtacttggcctcagtttcctcatcatccccatggcatttttgtgagaattaaatgagctgaaaccttgaaaccccttcaaacagcagctggcacagaggaagcacacaatcaatgtcagctgtactcttcctggcagtgtggagatcccagctctgcccctagctagtcacttctcttcttggaatctcagttccttcatctgggaaatgggagcagatgtgaaaaggggcagggtgagaatacatatgaaagtgctggctcctggtgcatagcaggcacttaataacgatacacttttccatcttctgccttccccagggatgcattgtgccatgtaagagagagagcctccagggttggcgagagtttttgatccaggctttttcaggtgtcaaagatgagctgggtgattctccatagattttcctttctaacaggtgacagttctgtttcagaaatactgtggatgttcaggtttacagcacattagtcaaaattagcacctcctcttccctgaaccattttcaggagatggaatccagggatctcttgatagtctggttctgaggagtgggctgggggacagcctaggatggggagccccactccaactacaatgctgtcgagttcccattgacacccccaccccctgcccaggaggtgagaagaatcagactatctacctggggtcccggtgctccctcccttgaagctgggacagaagacccaagactctggttgggaagaagttgagtcaggtctattgagataaggcttcctggagcctagagaaaaactgagaagaacttatccaattaagtatctcccaggagaagagtgactgtttcattttctgaagtgactaaatcccccagttcttagaacgtttgtttcattatttagttaagtctcctatcacatatctctgctggtgccattctaatcctattctggtggtgatagggggacttggacggcatctgcaagaatcccaccaggcctcttccatctcccttggtccctcctaggtgatagcagctgttgtttgggacctgccactgctttcttggaaactaccaatttaaatgccaatattgtcaccagctgagaagtgagtggtatggagtcgtcttaaagttgtcttttaaaccaattcttttgcacaaatatcagcttcattccatctcgccagtcttcttccccacttccagagagcttcattatcatcagcactgtgtgctgccttttctctgcttgcaaggggagaatcttaatgaaataactctgagctggggggcaagggtcatgtttctgtgtttctggaatgagtgtggtcaggttgcctgggcccctgtcattccagcatgctctcattgccaggacttggctgtaactgcaaaatatagtcagtggtaatacgcttggtaatggctaataaaatttaaatggctgcaaaatcacagaacatcaaaaaaaattttctcctggcacatccagacaaatcttgctgatccaagttagggtgtgcagtctttatttttattttttaatgcagacttgcacttttatctgcaacatagctagtgtgcagttgccagatcgctttttaaaaaaatcttgagacagatgagaaaataataattagaaaaagagaatgtggtgcattcatataatgcagacacatgaccagagagactctctcactagtaacacttgaatattttctaaaggttgggagtgggaggagatgggggtagagaatctttgaagtcaaaaggtaactgcatacccctctttagaaagcatttcagaaacttttagcttttgacatggttaatgtcatgtccttttctcagatcactacaagaggagtcacataaaatgtagggaatgtcttaggtctgaaaggctgttgggtgttctagaatcagtgattggaaggcaaaggactcaggtaggttacattgcaagtattccatgttctatagcactgcagagctttaggttaatttcaaattaaaatacagtccttactcccctgaaaaggcatcacttgcatgtacctgagttacttatttctattgtccttgcccttcattttggtgggataagggtggagaggcaaaaaatcagtgtctcagattctctatgagatttaaatatgcaggatctgaagaccatcttggctcctgctgtctcctgtcaagtgaagtgttgtttgcctctcctgctctttcaggatctagcaataaagcctgtgatgtttactgacctctgagagagaggtgaggagaatagacccgagaattttgtttatttggagagaggagggagagaggccatcctgttgctttcttgaatcacatagagagctaagagagaatgcttcaaagatggattggacactgttggaggagtaagtgattgtggtaaggaggtttccatgatctatgttttccctcagctgttttgaacattttagccaatgacaagtgaactgtagcaggatcctgctggtagctgtatgtgtgttcctgagcctgtgcaagcccatcaccgtcactctgctgcatgtctgtagaccttgtcctgttgagccctgggcagtgcctgctttttgatgctcagaccacatattcagattgttgttggtccccaggcagcagggcaggcagtctggtgggccactgagtgaagctgttggatgacagggagcagatggccctgatgcagaacatggtgggtctctgccacttgtctgacattaaaatccaaactagggctgttcccagttccctggaatggaggccactggccagtctgatgctgttaagggaaagttgagtgtagttcagtggtgacagtgctggctgccttgattcaagacctgactgctgcatcctctctatttttcgtcactactggcactcagagcctatactgagtgtccctttagaaggatgtagagttgaagaccctctgctttatttttttcatttaatcttctcagagtgacagtatcttaatccattcaaataccactaactgggtggcttataaacagcaacacttatttctctcagttctggagtgggaaagtccaagaccaaggcactgacagatttggtgtttggtgagggctcgcgtcctggtttgtggacagccgtcttctcactgtgtcctcatatggtgtaaaggatgcctgagctcccttgggcctttttcataatggcactaatctcattaatgagggctccaccctcatgatctaaccagctcccaagagccctgcctcctattaccatcagattggagactagggactcaacagaagaatttcaggaggacaaaaacatccagtccattgcagggtggaaggactttcatggaaaaagaaagcctaaatatagccctgagggtaaagaaagaagaggatgctgcatatttaggcctgcttatggtgattcctatggctggtgggaagggagaggaaaggtttcaggggcacctagagaagtatgtggtgggtcagtcaggcagggccacataagccaagggaaggaagtagccatgtgcttggtggtcaacatggttgagagcattggcgccaaagtgggatgagtgagtcaaatcatgctctacctctacctagctgtgtgatcctgggcaagttacttaacctctctgtacctcagttgccacatctgtaaaatgagataggaatagttcccgtgtcacgggctggtgaagattaaatgactctctggaaagctcttagaacaacacctgcttcacagtaagcattcaataaatgtttgttgcagttcttgacattacttcatgctttaaattctcctgtataaaagttatggtaaaaaaggttgtaaacgcttgcctgccatcatctgtcagtcaccagactaaccataatgacacgactcataaattttcggaatgaataaaggagtactggagtgttatcttggtggctcagcatggtgctgccaaacaaaaagaaagaaaagaaaaagaaaaagaaaagtgaaacaaactaagttttgagtcgtctctcgaataaccacaaaataaagggctaagctctttgccaccttgggctcctgggctcttagggacagtgcccaaccagtactttctaaactgtgcttgatgggtcacattactcatttgttaatgcagatttggggatgactgaaaagctgctggaatagaattcttagaaacagagtggagcccaggaatctgcatctaaacaagcagcccaggggagtctggtgctcactgaattttgaaactcatctgtcataggactagactgagtctcactgagtaaggaagttggttggacaaatcttacattgccagcctcttttgatgtctgggtagggggaatgttcagcagagcattccttctgctaagtccaggcagatgcattgcagttagtttggtggcctcaaaagcaaactgttttgaacagggagtgctaagtaatgggatggtgacatgatatgggttattgctttgttttgcttttaaagttctttcatgcgtattatctcctaaagaaatcaaatagatcgcagatgctcttgttgcaatgcccatgagaggagatgactttatctgagccagaaatgaaattctcagcaagagacacctgtctgttggaaatttcaacaaatattgccaataagattatatccctgttaacagtgggtatctctggaaggtgggataatgataattgttcatttctaacatcatcttattttggcatgggaggcagtgtgtggagtgcttgaaaacacacaagcttgacagaggccaacatgggtttgtcctagttcctttgcatactggacacattatttaatctctctgtgcctcagtttccttatctgtgaaatagggaaataataaaatagaatctacctcctagagtttaaatacatttgtacctgttaagtgtttaacaggtattaacaatgcttgacccttcttagttgttgaaaagaattagctatagttattaacaatgtcatctttaagtacatgcaactggttgtccttggaccataaagaaaaattaaagcataaagagaaatgctgcccaggtcctagaagctgatgtgtgaagggtctagcatatctgtcataaggaccaatcaggatttgctaggacccagctctctgatttgaggtctgatttttttttttttttaaactctgcagtgaggagtaggacccctatctgtttttctaactgtacttcttggagtgccaaagggagaaaggagagcacctgagccatgggggcttggagcatggactcttgtccttgccgaaaacaaagcagctataagtctattttgtaaaaaatatctattgggcttgagatttgattttcacagaggcttctgtggtaaacagacaaaagagttgattcctactggacttgctctctaagcagccttttttttctttctttttttaaatctcattttgacatctgtgattccaaagacagcactgtaattgtcttttttcagaacagagctcacttccaactatcatagcatgagagtactcagaaatttatttctcataatgagccaaaatctctctgcaactctttaaaggtagctgtggagcgccttacgtgctaatgagctccctgttaatagaaatgctcaggcttttgatggtttcagctcccagcttcactcatgactggctgtgttgtacggctgggtaagtctcgccacctgtccaagaaataaacataaggatgtatacaaagtgcttggtacagtgcctggtagacatcagccttggctgccactagcagcagcaacactactgttctaacaatcagaagtgactggtgcacatctgcttggaatcctcttcccgtgaccccagaagaagagacttatgttcatggttaaggataatttttagatgatgccattaagatctctcttcagtgcccttgacactgcgaatgggccatgcaccattaggagatggggcctttcacagttactacaggggctacctggaaacattgtatgagcacctccaagaagttgtcatgtgactcttataaggagtcaccctaatgctagcagttagctatgcccacagacaaggtgatggatggggttccctagagtccatccatcctgcactcttccctttgccctgtagggtatatttcagaagaaaacataaactgtggattgtataatcatcctctgatgcaaaccaaactttggcaagtgtaaacgattatgaaaacaatgcatatgtgaaacacactttccctgcgctctctgtttaatatcccaggttgtgtgccaggtttcccccccattttctgcatttcagaaatattttgtttttcattccagacagtgggagtacaaaggcagatttgtgtcatcacttaatttgttaattctgccaggatttttctcccaccaaccggcaatcctttttgaagtcttatatttaaggctggccttgaggaaaattacataggagcagcattgtatttaccctttgtatgactgcaggggatgtgagtaaaatcaaaacaaaacaagcaattttaaaaacaaaacagtacctctgtgagtgaattccagagtagaccggtatgccatggccgagcaaggtagaagagcagctcttcttgaccctgcatggaacctagagcatggggttttactttactgagccttcttttccttctaaatagaaacatgccctctggcatcttcccagagatgctggctatttacaggattgacatcacccagttctttgatttctctgctgatggaagaacagaattgtaaaacatcaacagaagctgctgcttaaaaagaatgaagatggatggatgcatgggtggatgcatagatgaatgggtggatgggtgggtggatggatggatggatggatggatggaagtatgcatggatgcttggatggatggatggatagatggatggatgatgggtacatggatggatggatgatgtgtggatggataggtggatggatggatgaatggatggatggatggatggatggatgaatggatggatggatgcctggatggatggatgaatggatggatgatggatacatggatgcatggatggaaagatccaccacagaaacacggatggatagatccagcgatggatggatggatggatggatggatgcatggatggatagatggttggatgaatggatggatggacgcatggatggatagatcaatgggtggatggatacatgcatggatggatggatgagtggatacgatcacccgcgctgcccccgctgaatgccttaccccttgggcggccccgtccttcgatttacaataagcggccccattcgtgttcgccccgaagcccccccttcgtcggcataccccccctcccgccccgccccccccctatcccgacacccgccccccaccctcctccgcgcgggtagtcaccgatgacccacccgtcccactgccacctccccacacccccccccccgcacccaccctcccagccaacccgcctccaaatatgtccctttccacctcctctctcccccccccctcctcaccaccatcaccctcacttctccgcctcgcccccccctnnnnnnnnnnnnnnnnnnnngatggatggatggatgaatggatggatgggtgcatggatggatggatggatggatggatggatggatggatgcatggatggatggacgatggatacatggatgcatggatggatggatgcatggatggatggatgatggatacatggatgcatggatggatggttggatggatggatgcatggatgcatggatggatggatgcatgggtggatggatgcatggatggatggatggatggatggatggataaatggatgcatggatgcatggatggatggttggatggatggatggatggatggatggatggatggatagatgcatggatggatggatgaatggatggatggatggatggatggatagatggatgaatggatgaatggatgaatggatggatgagtaggtggaagggtagatagatagatgggtgggtcagtggatggatggatagttgggtggttgagtaggtggatggatgaatgggtagatttatgggccgatgtgtaaagacagaggtctctcattccacaaccacatgtcctactggaagccttctctcccttcctatccaggctaggtagatgccccttgtccctgctcccatagcattgcctctctctacatttgacttgtaaacaagaagatacagtaaactgttatagttttcattttccaaggaatcagatgcttcagtacagccaggaaaaggtctgatacaccttgttcactgttatccccacaccaaacaacattagctcctgctacatgggagatgcttagtacacttttgttgaatgaatcaatgaaagaacagtgagtatttactagtacttgtgggggcaaatcattgcttgcattcttacatctctctcactactgctgtctcagagctagttttctcttaccaggaggccagatgggattgctgagcaagaataagattgcttccatctgtaacacacacacacacacacacacacacacacacacacacacacacttgctctctcagcacttttaaaggatcacttgattgattcactttaacagcctcatatcctccctttccacctgccctgaccccaattcctgcttgtaattaatttttcttctgaagggaaatattctctcaacttttctcctttttgatttgggtcccaaggggtatgaactcttggagagtgttatccctccctctctttctctctcagcccttgcatagatgcctattatcatcagttcaagccatggtatccagatattttgcttggatttaaaaccagaggcagaagctaatgaagggctttcatgttcagaaacagagggttcctggcagcctcactggcttctccatttaattccatggtgctaggggcactcccactgcttagcacagcctgggggactggcagatggcactatcggcccagaagggccagtcttccctggttcagccattgcctgtgcagccacagtgcccgtgtgcagggtagaaaccacagcgctaaaagacacttgcctgtggtcttcctagttagtatactttggtgcaaagaatgaactcttgctgtgggtgagcactctcgcttttctcagccgtagttttctcatctataaagtggttctgttatgttaccttcaagcacccttacaactacagacctctgtaattttcaatggaatgttctcttccttgtgaaaatacagaatgtttttcttgcaggtggacctgcacatgtaggaatgagtttgggtagctttaaggttatgcaaaatggtagagactctaagtgagcatgtagtgtaggggttctggggtcagacagcttgccctttttttttttttttttttttttgagacaagagtcttgctctgtcacccaggccggagtgcagtggcatgatctcagctcactgcagcctctgcctcccaggttcaagcaattctcctgcctcagcctcctgagtagctgagattacagtcatgcgccactacgcccggctaattttgtatttttagtagagacagggtttcaccatgttggtcaggctggtctcgaactcctgactttgtgatccacccgccgcggcctcccaaagtgctgggtttacaggtgtgagccaccgcacctggctgacagcctgcctttaaacagcaactgaattttatataataggcactgtgcccaatgctctgcatggatgatctcattcagtcctcacatcacctaagttctgctagtatccccattatacagttggagagttgaggcttagagaagttaagtaactggctgaggcacttgggtggcctagccaagttttgaaagcagacattctggcttgagttgagccactgaaccactctgctgtgctgccccctgtgggtaagtgcacaccacggcaggtctgtatggaggaggttttcaggattcacttggagctctcggaatgcataaagtgcaatactttcccattgccgcaaaaagatattgcattttaaatgtctgaaatcatgattgacttagctcctcagccctgaagggtgcagcagtggcttgaagcatcagaaccttgaaggagatttctttgaggaacactttgctatctcctgttaaaattagcagcaagcattctcagggcactctccactaaatatgtctggcaggagggtacacgatacctctcccttcactccccaaatcctccctgtattgcagtccagagcttttcaaactttatatgcattcaaaaggcatgggggtcttggtaaaatgcagagtctggctcagtaggtatgtggggtaaggctgattgaatttcaaacaaccccccaggtgactgttgatgcactggtctgaggtctacactttgagccacaagggtctagagtttatgattttcagggagctaagctggctgtatcagaatgacctggagtcttcagtaagcagcttcccaggacctttctgggatattctcaatcaggaggcctaggatagactcaggaaactgccagtgtcccaggaaccacactatgagaaacgccgcctcactcagtggttcctgtgatcgtcagggtccctggtggattgaggccaacttgggaaacattgattattgggtttgggatggggccagaagcccacttgtatcctgtttcgccgggggagcctaatctacactcaagtttgtgaattcctcgcagtaattacttctttacctcctcatctttcgtctgtcccttggccccaaactcttcctcaagctagtgtcccactggctcttgttccttctcctttgttgtagccagtgtgtgactccttggccctctgcacctggcttttgcatcctccacagtaatgttttgctccaagaatctcttagttgtcagatccagcaaatgttgaaatacgctattacttggccttgaagcggtactggacactgcagactgcctcttcgtcttctctcctttgtttgctgagattctgcccactatctcttggctgcccttctaccttcttggtcttcctccctggatcgtcagttgcctggaaatgaattctgacctttccatctaatacattttcccttgctcatttatttccataaactagtgatcctcagatatttttatttcctgaatgattgtccgaaaccacacatttgcgtcaccatttccttgcttaacgtggactctggagccagctggtctgggttcacatcctggctctgccacttgtcagccaagaaatcttgtgcaagtcactgagttctttaggttgcagttttctcatctggaggagggatgaagtacctcatctcagtagagcgcccagcactggggttgatgccctctgagcactcaggagatgtctctttgattttcctttaatcattagtaataagtagtaggaataataacaacaaccctccagtggctcccagattgcacatgaaatcaagtgtgtcttagagagccctcctggctggtccctcctgtctcttcagcagcagctccttccctcctgctctccgcccgccagctctgtctcacaccctggtgctgtggcacatgccatttccctctgtgcctctgtcttccaggcacaacactggaatctcactggagcactcacaccacttcccccagaagcaaagagccacgtcttccttcacgcttctggtcagtcttgggggtttttctgaagcatatgacctactttatcaactccatttgcttataggtctgcgtctctgtcagattgcgagctctttaagttatgcttgcatccctggcatcgggtttggctgacactcattgtggactgtttgaatgaatgaatgatttagtggcactgcaaatcaaaacccagtccactggtatagagggagagccctctgaatgtctgagatgatcttaccttgttacatacaaaaacttagaaatccttcttgagtcctctgttttagtaattgcccactctccctattctaatccattagcaagcccagtcaactctacttctaaagcagtgggtctcagtcagaggtgattttaaccctcatagtcatttggcaatgtatagagacatttttgatggtcacaattggggttgcagctggtgtatatggatagaggctaggaaagatgtgaaacaccttacaatgtataggacagtcacctcaacaaagaattatccagctttagtgtgaagagtgctgaggttgaggaaccctgatttagaggatactgagttcattcacagctctctgtcttccccactcctgtgctagtgtaaggcactgttgtcactccctggactggtcttcctgcttcctttacctccctctgtgcctccctctgtgctctcagagcatttctcacagggcagctgagtggtcttttataaaggataaatcaggccaggtacagtggctcacacttgtaatcccagcattttgggaggctaaggtaagaggaccacttgagccgaggaattcaagaccagcctgggaaacatagtgagacattgtctctacagaaaatgagaaaattagctggtcagtaattcatgcctgtagttccagctactcaggaggctggggcacacttgagcatgagaggttgaggcagcagtgagccatgattgtaccactgcacacaaacttgagcaacagagtgaaaccctgtctcagaaaaaaaaaaaaaaagataaggtcactcccctgtaatgacttctcatcacagctagaattctgaactcaaactccttagccaggctgaagaagccctacctgacctggctcctgctgacctctctgattcattgtaccctcccctgccatccctgggcactctgcttcagccccactccacaacccttctttctgtttcaagttcttcccaggctttaggtatgttcttgagatgttgcctctgcctggctgctgtcccctcttacccttggttggctgacttcttgtcttctaaacctctctggaactgcttctgccttagatattcctttcctcaacacccaaactacttgtacggttgccgactatcacatctccgtacatcaccacctagcacttagcactgcctgatttgttttttgttttttctttttcatcctcccctgactagagcaccattgagagtgagacctcccctgccttgtgaaaggctctatccacccatgcttagcacaatgcctagcacatagccagttatcaatagacagtgatgggaataggagggatagtaatagtttacacttatgtaatggagactaaaaagtctaagtgctttacatttaatctccaaagtagttttgcgagatgggtatcatgattggcatcttcattttacagataaggaaatggaggcatcagaagttatataactcagctgggtgaggtggctcatgcctgtaatcccagcactttgggaggccaaggcaggtggatcacgaggtcaggtgattgagaccatcctgggtaacactgtgacattccatctctactaaaaatacaaaaaactagctgggcatggtggtgggcacctgtaatcccagctactcgggaggctgagacaggagaatggcgtgaacccgggaggcggagcttgcagtgagctgagattgcgccactgcactccagcctgggcgacagagcaagactctgtctcaaaaaaaaaaaaaaaaaaaaagttatataactcacaatcaaagatcatgtagccatgtagctagaaagttgcagagctggggtttaacttaagtggtccaactccagagttgttgctcttaatcaccccaccacagtgcttgttgaggaaatgaatgtggaatttgaatgatgaattcacactcatccttccttagggtagcctttgtaggattgggattcagtctgatctgggttcaaattttgtaactgactcacattttatgatttacttgcttgtgtgatggggttatggtgtgggagcaccaaaaatctcttgtcttataaagagttcacttctaatgttctggatacttctctccatcctcactattgatcatgcttcctttgttgttttggtcacaaggaaactcaactaaaatttgagccctgatactagtaatcatataatagtttgtggaatgcttttgtctattacctttcttttctgcttttccttataacatcccattttccacattttaaactatttatttatctcagccaactcaatttatgaaaatatgaatttataacagataaatatgtatataaaagtgtgtccctggacaggttacctaaccactgtgatgcttcctgtcttctgtgcagtgttggtaatcattcctgcctcacagttttttggtggagcctaagtggggtaaagtccacgaaagcccagaacacacaataaacatttagtaagagtgtcttcttcctcttcctcatttacggtaaagatgaggaaatctttttttttcccctgagacagagtctcgctctgttgcccaggctgtgatgcagtggtgcaatctcggctcactgcaacctccgcctgctgagttccagtgattcttctgcctcagcctcctgagtagctgggactgcaggcacgtggcactacgtctggctaatttttgtatttttttagtagagacggggtttcaccatgttggtcaggctggtctcgaacttctgacctcaagtgatctgcctgccttggcctcccaaagcgctgggattacaggtgtgagccactgcgcctggccaagcatgaagcaatcttgtgctggtacctggcatagtggaggtgatagaaggtggtttaatatgtcttactgagctgctaagcagcagctgcatgtcttattgagctgctaattgatactactaactggggagctccattacaaaaacccacaataaatgataggctgtcatcatgccctgttttgggcggctcttttcactataataaattggtttttgagcagcagaaagataataggtttagtaagtagaaaagactcgaccacagggggcttgtgcataaagctcagcctggaaaatggaaagcatttatcagtaagacccacagaaacttttattactatggcaactgggtctttggtaagtctctctttagctagattataatgtagtagtgaggaatatcaactgtatgtttcaattgcttattagctcataaaattgccagtttgcatattaattgttactggataaaatagccctatttttaggtgacccagtcacccattttctgataccaagccactttgggaacttaaaaaaaaaaaaacagtagttatagtaataaaaactcttagccttagacaggcatcttctcatttaatcctcccagctactctgtaaggtcagtttcatctcccattttacagatgagagaggaaaagcccagggcagttaggtaacttgtccaaggtcacggttctggtaaggtgtagatccaggatttgaatccatgtctgtttgatttctatgataaaaataactttatagtcttaaccattaatatgggctatagcccatatgatatagaatataaagtttctgtaaatctgaaaaggcaaaaaatccaagagtattgacctttccctagtacagggttggttcttcaacctcaaaagtattgacattttggggccaggtaagtctttctttttgttactgaaacaccaggggttcggtctaggtcctgttactcgacacacagaaagccaatcactgacacgacgattattgccaaggaagaagcctttaattaggtgctgcagcttaggagatgggagctcagtcagtctcaaatccatctccctgactgatatggtttggctgtgtccccacccaaatctcatcttgaattgtagttcccataatccccacgtcatgggagggacctggtgggaagtaatttaatcatgggggtggttaccttcatgctgttctcatgacagtgagtgagttctcatgaaatctgatggttttataaggggcttttcccccatttgcttggcacttctcgctgccgccatgtgaagaagcacgtgtttgcttacccttccaccacgattgtaagtttcctgaggcctccccagccatgctgaactgtgagtcaattaaacctctttcctttataaattacccagtcttgggtatgtctttaggtgtatctttattagaagggactaatacgttgacccactaaaactagctttgtatagcagggaagaaatgtaacaatgtgtaagaaaacaggaactgggaaagggcaaggaaacgattatgatgaatagagagtctctgcatttcattgtctggatgtggtgatctggtgagtttcagctctttgatacttttttgagaggcctgaaagtccttccctgaggaaggaactgaaataaaacaaatgtaaacttcaaacttaagaccagaagggttatccacacccaccccactacatcccccagtattgcctaactttgcctggggaggaattggctaattaggactttcctggaaaaaagcaactctttcatttctgatgtcaccagtcttcttagatctcaggatttaccagaaagttttgttctttatttggttatgttcagagagctgtgcaatttattgcgactatctaattttagaacattttaatcaccccaggaagaaaccatgtacccattagcagtcattccccattcttccctctcttagtccctgggaaccactaatccactttttgtctctacagatttgcctattctggacatttcatataatggaatcatacagtatgtggccttttgtgtctagcttctttgacttagaataatgttttcaaggttcatctgtgttgtatcatgtatcagtacttcattccattatatggaatataggagtccagtttcgttcttttatatgtgaatttccagttgtttcagccatttgttgaaaagactatccagtgaattttcttggcactcttgtcaaaaatcaattgactagaaaagtaaaggtttgtttctagacactcaattttattttattgatccatatgtgtacccttatgccaataaccacagtgtcttaattactctagctttgtgtagtacatttttaaattgagaactgttagtcctctaattttgttcttctttttcaatatggttttggctattcagagtcccttgaatctccatatgaatttatgatcagcttgtccattctgccaagaagctagctgagattttagtataagggttccatagactctgtggatcaatttggggagtattgccatcttacccaattttaagtctttcaatttttgaacatggtttggctttctgtttacttaggtcttctttatttcagtgatgttttgtagttttcagtgtacaagtcttacacttcttttgttaaaattattcctaagtattttattatttttgatactattggaaatggaattgttttcataatttcatttttggattgctgattgctagtgtatacaaatacaattgattttggtgtatccaccttgtctcctgcaaccttgctaaacttgttcgttagttctaatagttttttttaaaaaatttttgagacaggatctcactctgttgcccaggctagagtgcaggagtgcagtggtgtgatcacagctcactgcagccttgacctcccaggctcaagtgatactcctgcctcagcctcccaaatagctggactacaggtgcaggccaccacacctggctaattaatttttttttttttttttttttgtagagatggggttttgccatgttgcccaggctggtctccagctcctgggctcaagtgatctgcccttcttagcctcccaaagtgctgggattacaggcatgagctaccactcttggctagttctaatagtttttttgtgtatgagtttgaaatcgttcttgttttctaatgtaggcatttacagctataactttcactctcagccttgttttggtatattgtgcttttgttttcattcatctcaaattattttttaattttatttttgatcttccgacccattggttatttaggagtgtgttaatttccacatacttgtgagtttcacaaatttccttctgttgttgatttctaatttcattccattttggttggagaacatatgttatatgattgcattccttttaactgtattgaggtttgttttatgtcctaacatttggtctgtcctggagaatgtttcatgtatgcttgggaagaatgtgttctgtggttgttgggtagcatgtcctgtagacttctattaggtccactttgtggtggtgttcatgccttctgttttcttgttgatcttcagcctagttattctatccattattgaagatggagtactgaagtttctaactatcattgtttaactgactatttctccctttaattctgtcagtttttgcttcaagaatcttggggctctgtttttaagtacatgtaattatgtcttcctgatagaagacattggctattttatcataaaagttctactttgactctaggaactgaacttttttttgtcttaaattcgattttgtctgatattagtatagccacttatactctcctgatttcaaatatttttttaagcctcccaggctattctaatatgcagccaggattgaaggcactgcttttttggataagttagaagctgaggatcagtattttgttgttaaagttagctcatagctaccaagagatgatagccatgggattttctgattcctgtgactgatgtagaaggcattatagaaatttcaggatgccttggtgaaacctttcctagagcaagacttgtggtgcactaacgtactattttccctaaagagttgttttcaagttacatcatgacacagagaatgttttcttgtgcaggctgtgggaacagcctgaaggagcctccctccctctctgccctgttgacacactcacctctgatgtatctgaatggaagtcttcagttcccgtgggtgttacagtggcttatcttcacattgtaggcctttatatctgccctttgcaggtgttttgagacaaaacctgagttttagggttctgctgtttatgtggatcatgtggggagggccaagaaaacctttcagagatgcctctagagagctcatcagaaatgagcttcctctttggagtccgaaggcaaagaatatgccacggaagcgaggatgtttgaagaaggaaaacctcaaggtttgctaggagccaaggggatgggagagggtggaggctctgaaaagtaaacccttcttcttttggcaaagataaccctccttgcctaagtgagatggaaaagggtctagaatggagtcctctctgagttcattcagacttgaaaactgtctgtgattcttacactcttcactcattttcttttttttttttttcttacttttttctactgcttgttaggagtcatcccttagatatcacctttcatgcagttggatgatacctttactgaaagactctttttttaggtggaaactattctgttctccctgaatctctgtgctcacatctggtcttaatcccagggacttggatccactgtcaggaagtttttccaccaagtagtgaaaagcctccagaggctcagttacctaacccacatttatttattatctttttagatctttcctcacccctcaagatttgtctgtagaagcagcggttgggaatatcttagtttcctgcttataaattctctagaattttcattccaatgtatatgcacacaaaaacctctttatccacatatgtgtgtgcattacaaatagccaaaataaataacctttaaaaacccctttacattataatttcctaatcccaaacttgcttggtggaaattttgccttttttttcctcgtcattcttcgtaataaaagtactttaaaggtcgatgatagccactttgaattctgttatggtttatagtgtctttctttctaaaagtacgaagaatattatgggcttgtctctcttctgctccctcagggctgttggggggatgaggagatttccttgactttcaatagcctcatgatatctttgtgagttcatataaaaagtttcttcagaaaaaacaaatctgactcatcactttcctttagaaagatgtctgttggcttccaggataattccagactcctgtctgcctcgctcccagacgcatctcctgccgcatagcccatgtcccaggtgtcctaacttctcccagatttctgtacaagccataacctgtttcaactctgagcttcagttcatgccattcctcttgtctggagtgtccttccctcttttttttcactaacacactcctaataatctttcatacccaactaaaatagcacaggtttatgaagtactccttggcttccccaggctgagtgggtcccactctttctgagttccttttgcattctggccattccccacgtattaattaagcatccactgctgggcagaaagtgtctgaaatgataataataataaatgggaatagtaataatagctaatactgtataataatgctggataatctgtaacactcaatactacataacactacattttatattttataatactatattttatagtgtaatatcaaataataagatgtaatgtataaaacgatagcaaatatagtattaactatcatagctaatactttgttccagaaaaagtgccaagtaattattacattgtcttatttaatcccctcaacaactgagcaaggttggtagtgttcatctctctatttcctgataaggaaattgaggcacagagtgggtaaccaacttaccataaatcatatggccaataagtggtagacacaacatttaaacccaggcaggctgacatctaactgcttaactgctgtaattaacttttttttgagacaggatcttgctctgtcacccacgctagagtgcattggtgtaatctcagctcactgcagcctctgcctcctgggctgaagcgatcctcccaccccagcctccagaatagctaggactacaggcgtgtgcctggctaaatttttttttgtattttttttgtagagataaggtttcaccatgttgctcaggctggtcttgaactctgagttcaagcaatccactcgtcttggcctcccaaagtgctgagattacatgtgagagccaccacagctagccataattaactgttgaaaggcaaatgttgatacagcttctgttgtgcttaccacatctcattgcaatcatctgcttattgtctctttttcgttctctttctcttggccaggtgttttttttagctaagggcctcttgctagcaggaatcattcttgcagcccccacacttggttctgtgtgtggcataaagtgagtttgagaattaatgttggtggaatgaataactgaaagagcaaagccttagactgtctaaacattacattgatttccacctcatttttctcaggactagccgtctatgtgtaaagcaatttgtagaaccatgaactatgttagggaagggagggcattactgaatctctaccagatagcaagcattttgctgtattctctacatgcaaaatctcattttattttcacaacagcttgggagttctataccatctttatcttccttttacagatggggacgctgaggctgagggaagttaagtgattcatccaagatctcagtgattacgtggtggaactgaggtggaaacctggatgcttcttttcttttctttttgacagagtctcactctgtcacccaggctggagtgcagtggcgcaatctcagctcactgcaatcaccgcctcttgggttcaagcgattctcctgcctcaacctcccgagtagctgggactacaggcatgtgccaccacacctggctaattttttgtatttttagtagagatggggtttcaccgtgttagccaggatggtctcgatctcctgatctcgtgatccacccacctcagcctccccaagtgctgggattacaggcgtgagccaccgcgcccggcccagaaacctagatgcttcttatctctgagtccttctgacctcttaaccctaggctgtagacctcctcttctcagcataaaagagaagagttttggaaagaattttctacgagagaatcttgtggcaaagctgtttcaactggatgccttctttctgtatttatattccagttagcgtatggtctgttgctctttcactccccagtgtgtacgtctgaaacagccaatatgttattttaggaagaaataatacattgcaatatctgatcaataaaacttggagtctactccagtagtcatgtggagctgaactgttgcaacaagcaaaggactttttgctcaagccataaattttgcaaaggctagaattccaggagtgagtttgctttctgggctgtttgtcatctgccttgggaccacaataaaggagctcccccgtttagcccccagatttcctggagaatccaggcagattactttttagaagtcagttatttttacaaggccttctttgctttcttgtccccaaccatgaagtcattttcaaaggaaccacagtttgaccttttaccaaatgagctagaggactgaatatattaatagcagcaacatcagatcgaccgctttttgcagtttttagctagcaatggccacatgtcggttttcactttggggagctgtgcatgttgattcaaattatgtgaattttatactttgattcttttctaacatatacttttgattagcccttgtcattctcacatctttacagtgagctgaattgtaactggttcatagcacatttttttatgagaaatagggcttttttttttttaattaatgaaaagatgccaggtacttttgcgtatatgagaagcttgttcatactggcctcctttcagttcctcctttaccacattgttctgcctccaggcctttacacaggcggcttggaacatctttgattccacaattccacaaacactaaaatttcaaatgtggcctaggtgtcttctatgtattctcattctttgcaggtgcgacacagagtttgtgaattaatattagtggaatgaaaaacggaatgagtaaggcctcatgctgtaaatattacattgcttttccgcctagaccgtggccgacctcagctgaaaccgaccttcccctgagaagcctgttctgatgccagcctcgttcctagtttgagattaagcatcctatagctccccaatcagggcactatttgcattacatgcagaggctcctttacctgtctctgtcttccactatcacagagagagcctgtcagcttcgcttttgaatccccacacaactgactcagcaccagacaggtaatagaatgcttaggaatattttgatattggccaaacaggggcagattctttattgcctctttaatcctattttctgttgggcacaggtaaatgtaaatccttacaaagtagacagaactgagtaagtttcaaagctctaaaaagggcctttttgcttgaacaaaaaccatttgtatatgagcccacagcttttgtgtgtgaagcagaatttgtatcttgcacacaaatggggaagaagagagcagtgttgaaatggggaaagatcataaagaggccagttgtttccttgtggatatttatctcatggtaactcctctatctggggtgtattagacttggcttgaaggagtcatggccagagtaggtccctcattggctgtgtagccatgattcttggagcggcaataacatcaggaagaaaggaatcatgaggccatttgctctgtgggtataagaaggtggtagaatcggtcagagcaggatgttcacattttagtgcccattgagatccttagtgtgcttagtaaaaatgcagattcccctaggggagagactcaggaatctgcatattcacaagcgtccctggggatcctgctgcaggtggatcactgacttgttctctgcaacactgccccagaggatggggaattctggagaaatactggcaagtaggacagtcctaagagcgagagcctgcccttgccctttgtcaaggtccttagtcaaaggagaccatgtagcccaggaaagtcaactcaaggagcatctcacagaaggaggatgctgcattttgccatgattcctgcaacccagagaaaccaattccagcaaagatcgatgccctgtacccggtgcaaatttagaatgataaaaagaagagtcatggtttccttgaccagacaggagtgtcccctactttgcagaataatgaaatacacagatgttaaaatgaaaagagacagagatggatggagaataatagagcgcagcagcagttaaggagcaacttaacaaaaatgcagaggaaccatgggatgctctcagcctttgtgcttctaggagcgtcattgccaacttgagagaatcagcccatcgcagacaatcctaggctggaggcttttctcatagctgtctgtggccagaagacaataccagttcctcagggaggaggcagtcaacagtcaaaaggataccaaaatgtaaagcatgcatgtcctttgacctagcagttatactttcacgagataatatacaagtgggaaaaatatatgtatctggctgtgcattgtttattgaaaacaccccaaatgtccatcagtaacgggatttatggatacatagacacagtaaagttacccttagccattaaaaatgatgatgtgtaccagtagttattgacaagaaaagatgtcacaacatattatgtagcaaaaacaggtttcagaatagcatatattttaagggtgcatttaagtaaaattgcatgctcggatttctgcctattaattcagtcagtaattattgagtagtctgtgtgcctggcacttctctgggcattggagatacacagtgaacaagacagtggccctttgctattggaagtgtggtacctggagccagcagcatcgcctgggagcttgttaggaatgcaggatcccaggctccaccccagacccactgcattttaacaaggtcctggggcaatccatttgcacacactagtttttgagaccatgctgtaagagcatgtttaccaaaatgtccacagaatacttccccacgtggtggcaatttgttataaattttacatctgtctttgtatgttcctccatggtttgactttttcacagtgagctatgtcttgtgtttataaaagcaagggtggtgatattgtggaacagctcctcattcgttgggctctctcagccacatactggcaggatcctggggcaggagtgggaggtgagcaggggttgaaggtgagtagctgttgctcatttggccaaccacagaggtctagaagagagatcctggagacccacagctacagcaggagctgtttccatagcctgagagatgcagcaggtctgattagctgacttcatggctgttctggtggaacagagaggcttccacattgcagcctctgtccagctcttttgtatgattgctgcctgggaagagtctggggaggtggccagagacagcaagcccatgctgaagtttccatcatcctccaggaccttgagcagccctgagcccttcccaggcagattgggagctacaggcatgatgtctggggaagagccttctatacaaggcctggaaagttctgctcctgtgggagaagggctttttcttgggagtctctcctgtacctgtcccagatgaggggtttgatcaggtatggctctagggtaccctgcctaaagtgtagtgtagttaaaagaagctggactctagagcagaagaactggactatagaccagtctgaccctaaatagctatgtgactttgggcaagtccagttgcctctttgggcctcagttttgtcatctgtggaacgtgagaattagttactgagtgcacctatgtggactgcctgtgtgccccagctgttacacgagtctttgtccttaggatatcacaacctggagacactggaatgcctcctggccccctctagttctcacgtggaccccaaatatgggtcccaggactgtctctgatttatgacctggttgtcactggcttctggtgaaatgggaaaaataaggacatctagtgaacatgtagctataaagtttctaccctttcagggtggagagttctttactctgagactttgccttcctgtatttcggatgctaaggcagctgtttatttagggtattagtaagtagagctcattgctggtgtttttgtaagtctttgtgtaaaataaaaagttggcaattgtattagtctttcctccactctcatctactttttttattttttattttgctgatctgtgaattccaggactgtgggaagtaggctctaaaaagtggggacatgacttagatcaggaaataaacccaactcacaggagacccttggtccccatcttcctgctaatgaaagctgccgctttgaaaagtttgtggaccagatccttgagaagtggtgaattcaagtattcaatggagtagagtcaccctgtctgcctttgtcagggctgctttaaagacaggcagggtcagtctttcaccttctgtcgggcgctgctgagttctacgaggaaatctcccctttgtggaaatagggggtgagagagggacagtcggggccttgcccaggaccccccttccccacagccctgtagcaagtcatgcaggcagggagcagctgacagctgttgtctgggataggcttctctctgcccctgccaggcactcggctggttgcctgtgatctgctttgcaggcatgtgatgatgcaaatgtaaatcataacaggacaggcttccctgacataaacagcaactgagcatgctgaccaggcaggaagtctcattagtaattcctgaaaagggtgcaagggcagggccaaagagctggttaattgaatgatggctaattcgtttataattattcatattttcactcttttctctttctcccataaaacctagtcctctggagctgggctggtccttagagaaatctaaggaggcggcagagcagctgtgccatgggaaagatttgaaccttgactttgtttattagcagtgtcaagttacttcacttctggacctcagttttcttatctgtaaaatgttttttttgtgtgtgtgagaacttaaagaaaaagatatctgtgaaacagagcgcaatgcttagctcatattaagcattcagaaaatgctagccatgttctccggcctcactctttccttttataggttcatttggacattatgcaaatatttatgaggcacatggtgtaggcactgtatggtgcagctcctttaaaaatggtaaatgaaagtatgcaaatgagcgtacgttcttggaggctggaaggcagaggcgttagccaaacagcttaatacaaaactggggagaccaagtagtgatgtgtcctgtgaagggaaagaaaagaaggctgagggttagagcgactaagggtgggagtgtaggttctactgcagatagtgcaatgattcaagagactgagtaagatggaggagtgagccatgctgagccctgggaaaaagacattccaggcagtgggaacagagagtgcaaaggccctgaggtgggaatatgctggctgggcttgagaaggaacaaggaagcctgtgtagttaagatttccaagatgggaagatcttcatggccttcatgagaaagcctggaattggagagcagcatgatgactctaggttttattctaacgtaatgggaaggcagtgacgttcttactagaggagtgatgtgctgaggcttgaggaaacactctcagcgtagatggcaaagcctataagcattcttccctcatccctcaaaaggtgatcagaaccagactggctgatcaaggaccgtgtgtcagaagcttgaacctgtctggaaggacacgatggctggagagctggcagaggggcaaacctgaccctggaaaatggaactcctctgcttttctgttactgtagactttcccagcagaagctaaaatgcccatctgtgcagaaaaagcattaacgcagcaggcctgactgctgccctttgaaaagtctgcttggaacattggcccttggctggcagctgggaacctaaatttcagtaggtttcccattacccaactgttaatggtggctcactgtgcctaaactggctgtgcagacagtgtagttgatgctgtttttctgctggaagtctggaaatttggtgtaccgagaatgcctgtgtgaccagcctctcataaaaaccgtgagcactgagcctctaatgagctgccctggtggatgacatttcacacatgttgtcaacaacttgttgctggaggaattaagcacatcctgtgtgtctaccctggaagaatccttgtgaaagcttgagcctggtttcctgtgacttcatttcatatgcctttcactgtaagaaatcttagctttgattatatgccaagtcctgggagttagcctagtgaatcattgaatctgtgtgggcttggggacccctgacacagcatcttatatgaagcgactgtagtgttggtgtatctcattactgatgatgttgaccatggtcccttggctgaggtggtatctaccaagtttctccactgtcaagttactatttttctctttgtaattaataacatattgcggaagatactttgacactgtgcatatcctatttctcctcaagtgtttattttctaattttagcatccattgccagatcttgcctgtaacagttattacaatagtgtctgcttcgtggtgactttctgtttcctgcacctcttctacatttattaatgagaagtcttcaataaggaagaactttcctttctcccctttttacttacttattcaacaatttttggtatcagtctcaggtactagatccttattttgttggcctcagatatttattttattctctgtgtcataatctgataccgttgttgattttgttgcttggatggttctagctttggctattgggaacttcaggttaacttctgtgtccttttgacatgcccccatgatatttggacacttatttactttattttgacacttctggcaacagaagatactctgggttcatcttgtttgtatattcttcctggaatcaactatttctccaaggaggttggttctctttgctggataatggtatttagaaaccaagatctgggtgctaggtgtgcttattgctgttgagatgtactgcttctagtcttctctcagcagacagagctaggaaatgtatgtatgtgcattatcccttacatacacacaagtcaatatttatttttgtctgtctgtccatccgtccatccatccatccatccatccatccatccatccatccatccatcctgtctgtctaatttttaaagaccttgagttcatactggtgacctccaattccttcaaatttccattggaaattttggttcagtttcaatgaaccaaagcctcaggattcactttagccttctcactgtctttttttttttgagatgagtctctctctgtcgcccaggctggagtgcagtggcacaatctcagctcactgcaacctccacctcccgggttcaagcagttctctgcctcagcctcctgagtggctgggactacaggtgcccgccaccacgcccggctaatttttttgtatatgtagtagagacgaggtttcaccatcttggccaggctggtcttgaactcctgaccttgtgatccacccacctcggcctcccaaagtgctgggattacaggcgtcagccaatacgcctggcctagccttcccactttctttatttgcaacttctttctctgacagaaatcttacaatatatttacatatttgttcacccctagtgcacccagaagacagtttcagaattgatgacccatacccttgggagaaacaaatataactagtgtacagtattgtagattttttttttctttagctttatggaatctagtcaacatactgttttcctgagttacttaggctggttcttttcttccccatccccttcagtgtggtggtgttatttactagtaatacagttatgtttacttgttattgtttatatttcattttgagttttccccacatgtgattgattttaagtgtttatttttggggtatataaaatactaccgtagttctaagatatacactgctctgagtatatttacacaagtatatgttaagtcagatagatatactcggagaaatgtgtaaccttctcatcctgttatcttgtctgatatcagttccccatgttttttcactcctttcccactcacaccctgtagataaccaatctctttagtttctggtttatcctcctgtatttcttttgcacagataagccaatacatgtatgttttcttataccccttctcttcttatatggagggcagcaaagtactgttacgggatctttggggtatcactttgccaactggaaatttctgtggccagtgacacctttgcccaagttttgctctggcctgctgggcttctctgcctacttgacctggcaggctgcgttcggctcccactaccagcctagatcccatacctgccaagggcaagccagttgcagaacagtgagggttgtgtgagcgagcgtggagttcagccactgcacagccaggtatgccagctgtggtggggcaggcagctccaggcaccagcatgggtgccagctccctgcaaggctgcaggtggaccaggcataccttaagcagcttccatggctgacactggggaatgcagtgtggtgcccagaaccttggagacttcagcaaccacagagccctaaagagtgtatcacaaacctggcttggggttgctcctaggtctgggctccccaaagggccacagctcttctcttccttcttctctcctcttgtctgctgcgacatggtgggcaaacagcatgtttcagccctgtttgtgttatagctcttttagccttgccattcagtgagtccctagttcttgtcctgcatccgggaagaatgaggtacgcagacaagtggagggtgagcaagacaaaggggaactttattgagtaatagaacagctcagaggagactcacagtgggcagctcctctccgtagccagggtatcttgatgagtgttcagctctcagcagagagggtagctcctctctgcagcttgtcctgttgtctcctcaagtctggctgagtccggagtttttatgagcctcagaggggaggaagtgcatgctgattaatccatgggcaggcctggaaaagttcccactccagtctgcgggacccacagcctggccctcaggcctcaggccttccctggcttgaagattgggcttcacctgggacctaccccttctgcctaggagcatgtctgcctcctgctgcctttcatggtgcccaggtttgtaccaacgggcacctgcagggcagtgccaagctgtcttcagcacccccttggtctccctcccatgtttgtcttcacccaaagtccggaggcggctgaagtggcaggggacttgtgtgtcagtgctgccctgagcgtgcacacatccggctgggttgcaatagttcccaggctcatcctcaactttgctccatgatctgagtgggtgctgacagcagggagaggccagggagctggagcagacacctctgagcctgtgggagtaaggggggcccagggagtgcagagatgtctgcatctgcagctgcaatttgggtggctgcagccatgcccagaagggtgggactcctgcctgctccatgcttctgctgacactgtagagtgtggcactgccctgggcccagctctgcctcagtgcccctctctgcctgcctctccatgaccgaccacactgcttccctaccagcggacgattcagcttggccctgtcacagtggctcccagggtggcgggcaaggtgcaggtggtacggcagccccagtcaaccccacacaaatgaacctgacgcttccagggccagtcccataagtcccagctgtgccatcagctgggtgctcgcaggcccctgggatacagcggagagcgaggttaagactgtggcagaggcttcaggtctgggagcggatcctaccaggccgtgtgagggtggggtttttggctccctcagggacgcagggcacaggggacctactgccgccactgctgctcctgcagccactcctgctgccacagctcacgcttccttactgcagctggtgtgatggcagcggccactctgaacagcccactgctgccatcagtactatagatactcttttctactttacttttttgacttatcagtatgtcctagaaatcacttcataccagtttatagagacctttcataataagctttctaaactttggtcatcagaaaaaaatttctgtcagcccaaggatcagtttttaaattctatgaacttagtgatgatgaggaggatgaggatgaggatgaggatgatgataaatagcataagcattaccattaattgagcatctactgtattctatgctctatactgttttgtatagattatctcacttaatctttgctagagcccaaggtagtagatatcacctccaatttactgataagtgctgtggatacaactggttggggctgatgttgtgggtggtgaaagaataccgagacagtcataggtaaagaaaggcagatttgttagcgaaagtacaaaaatatgttgcatgggtgcaagaggcagcacagcagcgaaggggctatctgcaaagccacaggggctggagaaaagttttatagggtcgtgctagactaggggcctacttgtggaacgaggtatttaatgaaaggatgttgggccagtgggtttgtgattagccatttcttggaacaattgttctccccgacttgggccctcttacttgttgttgcttacttatcaggatgccacagtaaggaaactgaagtccaccaaaatttagaaacttgtccaaagtcataaaaaatagagttggaatttgaacccaggactgtccagagtttatgctttgagaagagttcaccagtaccatgacagaagttccaaggtgaaacaaagccacatgggtttttgaaacctggaacatttcaggccttaaaaccctgatgattgtgagttggctgttgccaaagtcagcatgttacagacagcaagaacatggaggtaatttattgcctgtttgtttcaaagaaatggcccttccttcttggaggaccatgggtcctgcctctaagacagaagacaagagggatgctacatagggcctgctacctgggatgtagcaataggtctcatcttacatctcctaatcgcaagccggagcaccagaaccattaacgggagagtacattaccccacagggctgtttgttatttagcaggacactcaattaagcccaagttacagcagtttctgctaaaactgtttgtgcagcatgagtggaagaagaatttatttggagcaggagtctgccttctgttgtgaaaagtgacagcctctggcagagagagaggcaatgctgttgagttggttgaaatcagggcttctggaatctgcatgccgggcctcacccggtgcttgattttccagctgtgtgaccttgggcaagtcacttcatctctcaaagcgcatttatgaagtggtgataagaaccatactcatttgtttggggctcccaagaccaccccagattcagcgatttgccaggaggattcacaggactcagtatatgatcatactcatggctgtgattaattacagcaaagggatacaaagcaaaatcaacacaggtaaaagacgaatggaataaagtccagaggaaaccaggttcaggcttccaagagtcctctcccagttgagcccaaaggatgcactaattcccctagcaatgagttgtaatgtaacaacatatgtggaaggttatccaccagggacactcactagagactcagtatccagaatttttatcaggggctgatcacgtaggcaccctctgttcagcatgtaccaaaattatagcctcccagaagtaaggaaagcaggggtgttcagtgtaagttgtactgtttgcataaacagtttaggtacagtgagccactcttgttaggtagggtggtgcaaagtctcccaaaatccaagttcccagactccagccaaggaagagccaaccttgcaaggaggtctttgtaagcgtagcagttgcggttctgttttgttacctcttttctgcccatcatcccattgggtgattgctgggtggattaaatgagatgatccatacaaagctctcagcacacttcctagtatggtgaatacttactgaatgttgattacagttcctttgacattcagggaatgaattttgattggtgcttcagcaccttcatctactcgtcatccatttacttacctgttcttcgttcatggctttgttcagcacattttgattggcacctgctgtggtgcaggggctatgttatcctcttgggtacttttgaagcattcctctctagacaatgtggcgtgtgggtgtccaatctggctgggtgtttgaggtgggtggtggtaatgagaagaaagcttcaaggactttaagatgaatcttaagtggactcattttcacattcagtgttagtgggatgagtatgcagtcatctgagaacatctcctgatgtcttgctgtttctttttcttcctgcagccaaggctaagtcgaaatgtggcccaaccttcttcccctgtgccagcggcatccattgcatcattggtcgcttccggtgcaatgggtttgaggactgtcccgatggcagcgatgaagagaactgcagtaagtgctgcgcacttgaacactgtgatcccttgttctttcccgccagccaaacttgtccacattggtcaccctcatcatgtgcttcttatacctagaggctcaggcattctcttctgttacccagattctgttcttccctacttcttgtgtaaatctgtaaatgttcagccaccatttatcaggggctctaccaagtgcactgagcctgaggcttgctgtattttcagttctgacaatagctctgcaaatgcagatgtattatccttagttaacagataagaaatttcaagttagagaagtacattaactcatccagggtcacatagctcataagaagcagagccatttctaggttcattcagaccctcatctgactgatacaacacttaatgtttatgtgtttgcttacttttttcttactttgaattcttttattaaaaaagttggccaggtgtggtggcttgcacctgtaatcccagcactttaggaggctgagaagggaggattgcttgagtccaggagttcaagaccagcctaggcaacaaggtaaaaccccatctctacaaaaagtacaaaagttaagtaggcatggtggcacatgcctctagtcccagctactcgggaggatgaggtgggaggatgcttgagcctgggaggtcaaggctgcagtgagctgagatggcaccactgcactccagcctgggcaacagagtgagaccctgtctcagacaaaaagtgtttatatgttagttgtatgcatactataaaaatttattcttgagaaaacagttcaagtagcatagatgaagttaatgtccttcttgactgtgaccaccctgatttgttttacctgctgtataatattcccctggtatcagtgtgcatgcacacacatactcatgttcactccctctttccttgcagcttagcagtcttgctgttgggtttaactactccttgccttggatacatgcagatccttccttttagcatcctgctgtccacaatgactttgcgtacagcagcctcagtgaccttcaagcctctcttcttcgcctttaatactggcccagctcgcccatcaggttgcttcatacctgccactggtcactctggtcactgtttcttcttctttccccattcctcaaaatgtttagactacttgagccttcataattatcattggctctgaacaaacttacgcgtttattttctgtgcatatatatataaaagactttatgttttagaggggtttgaggttcacagcaaaactgagaggaaggtacagagattttccaaatcctctgccccaacacatacacagcttctcccattatcaatatcctcggccagtgtgatacaatcgttacgatcaaacctgtgttaacacatcaagtccataatttacattagggttcactctggtgttgaacattctatggatcttgataagtatatcatgacacatagccaccattatagtatcatacggaatagtttcactgccctaaacattttctgtgcttgtcctattcatccctttttgtacccccaccacatattttaataaatatttttcttctcattattgtaaagaacttggaaaatataaacaagtataaagaagaaagcaaaactgcccatatcccgtaagttagaatgagacactattcatatttatcccattgttggagatactagattgctggagaattagatgaaataataaccgaaaagtagtcagtataatggctggcacagagtaattgattttttaaaatagtggtttaaaacaaaactgtaagagaagaccatagttactaggattttgcctttgattttggacttacaatatacttcttttgtattttagttaatcctttagtaagtgagtatcagcttgatctctgcttcctgctgtccatggggatcttataatctaagggagaaattacacacacacacacacacacacacacacacacacacacacacacaccccagaataatccaatggcaataaaatgcaagtatgacgcattatagtataagcattctaaatgattatgtcatcctatatattccctgccataattaaagaccttgtatgatttaaatgtttggacatttgtctttaattttctctttttttttgagacaaggtcttgctctgtcacccaggctggagtgcagtggtgccatcacagctcactccagcctcaacctcctgggctcagctaatccttctacctcagccttgtgagtagctgggatcacaggagtgtgccaccacaccctcctaatttaaaagcaatttttttttgtagagatgacattttaccctgttgcccaagctggtctcgaactcctgggctcaaacaatcctcccgccttgggttcccaaagtgctgggattataggcatgagccaccatgcctggtctggtctttaattttctaaatgagtaaattatacccattccaaactatgccaatgaggattaagccagcatcttcctctgacatagctaccatttaaaaatagtggttctgaagccgggcgaggtggggcacccgtcttaaccctagctactccagagtgtgaggtgggaggattacttaaccccaggagttcaaggtcagcctgggtaacatagcaagaccccatccctataaaaataaataagtaaatacaattttttttaattagaaaaaatagtgattctagctcactatgttggaaagtggtaaataaaagtatgagtcaaactatttatcccctcgttcctatgtgaattatacttcagagtaatcaaatagctgactttaaaaggttattttttattgaagaataccagctaatagaagaataaagaaattagagtatcttcattttgtaactcctaatgaaaaatgggtctaggtaatgatcatcaatgactgcttaaaaccattaggtaaaaaattgatggggccttcataatggagagatcaggctgaaaactcctgaatctaccagtcagtcttctcacagctttgaatcagtgtggattcacttcaagtagaatgtattaatagaaaccttgccactctctaggtcgctttagagtatagttgtcttatataatacatctgtgtacgttagccaccccacaagaccgtgttttaatttttgctttaaatattcaaacatattttgaagagttccaaaggtattgtatttacccagatattcaccatttgatcactctttccttcattcatgatattgccaagtcttcttctagtatcattttcctcctctgtgaagaaattcctttagcaattcttctgaagttggcaacaaattatgttagcttgccttcatctgagaatgtctttatttcaccttcattcctaaaggatatttttactgcatatagaattctgagctgacagttcttttctataagcactttaagtatgccacttctatctggcttttacgatttctggagagaaatttacagtcgttcaagttgtttccccgtagattatatatcatttttctttagctgctttgaactgtttttttttttttgtctttagttttcatcagttagatcatagcgtgtctgggtataatttctttgagtttatcctgttagggttctctgagctatttgaatctgtaggtttttgtcttttgctatacatgttcagctattatttcttcagatattttaaaagtattatacgttttctcctttctttatgggagtctaatgacaacaatgttagatctgtttttatagtcccacaagtccctgaggctctgtgagtttttatttttttatattttggggggtaggtcagggtttcactccatcacccaggctagagtgcagtggtgcgatcatggctcactgcagcctcaacttcctgagctccagtgatcctccctcctcagcctcctgagtagctgggaccacaggcatgcaccaccatgcctggctaattttttttttattgtattttttgtagaggtgggttttgatatgttgcccaggttggtctcaaactcctgagctcaagtgatccgcccgcctcagcctcccaaagtgctgggattataagcatgagccaccacaccagagctctgttcatttttaatcactcctttttctttttattgttcatattggacaatttctgttaatctgtcatcaagctcacttactctttcatctgtcatctccagtctgctttcaagcctatatagtgttttgttttgtttagttgtttaaatttcagttactgtatctttctgttctaaaatttctttttggttttctttatatctttctttgctgagactttctgtttttccatttgttttgagagtgtgtgtgattgcttactcgagcatttatgtaatagctgctataaaatcttcatcatataacttcaacatctgtgtcatcttggcatttgtctgttgattgtcttaacccaaatgaattgagattttcttggttcttaatatgacaagaaattttggattatattctggatattttgattattatgtgtgacactctgggtcttatttgaagcctagcgggagtgcttatatatgtgtttttgtaggtaaatgacctgcgcaggtcaggccacagttttctaccagccctctgtgggctatggttacaatcgttttcacgctgtttttgcaatgctatttggatgtatcctgcctatggccctaccagtagtttgtgagttcagtctttgatgtgctgattaggaccaggtccatgtgcatgcagcttgaggggatcatcctaggagtttgtaaacagttttatgggttagcttttctgagctcctttctcttcttagtgtctctggttctttccagttccctggggctccaaaagggagaaaatacggtaaactcgccaccattttggtgatagtttaaattttggtcttattctccatttggcctgctccaaattacccttcacagctactgcatgcattctcttcaggttttttaagtgatattcagtgggaaagccagagtgaggtgtgatgactgcatctgacctggagcaggaacttctataagccagtttcagcagcacaaaaagacagtcgtctgatgcagtgcaaaggaatacgcatcaccattatgagattgttctgccaaaatcatcccacctgaatctgattgagcctctaaatctaaccattagtttactggaaattcagggacaggggaatatgttaatgaccccacagggaggcaaacttttagatacagaatgtgggaaattctttaagacccagtttcattcataaataaactctaagaaaaaaaaacagaggaaaagggaacttacagattaagagagtaaaagacaaattaactaaatgtgatgtgtggaccatatttgaatgctgatcatacaaatcaactattaaaaaaattgagatagagaaatttaaatcatggtttgatacttgatattaaggcattattatttatttttaattgtaagaatgatattgtgtctattttttaaagtccttatcttttagaaatatagtgaagtatataaagagattatgtgctatctgggatgcacttcaagccaattccatcagggattgaaacaaaatgttcagtgagttgataattgttaaacccatggagttcaataaaccaggctgtatttttgtatatgtctgaaatcttccataatgaaatggtgagaagaaataaataaaagttaaagaagtggttctgtttggtgatgtcttgactttaacaaaaataactagagagttatatttttaaagaactttggtttgcagacatgtgttttccaggtttagcattcattttgcactcaggagtgaggataagcaaaaacccagtatatataatttttttttttcccaaatagggtctcactctcattttctaggctggagtgcagtagtacgaacacagctcactgcagccttgacttcccaggctcaggtgattcttctacctcagctgcccaagagtagctgggacttcaggcgcacactaccacaccaggctaaattttttgtcgtatttttagtagtgtcggagtttaaccctgttacccaggctagtgtcaaactcctagcctcaagaaatccaccctgcttggcctcccaaagtgctgggattacaggcatgagccactgcacccagccaaatttaaaaaaaaaaggtagagatggggttttgccatgttgcccagactggtcttgaactcctgagctcaagccaactgcttgccttgacctcccaaagtactggaattacaggtgtgagccaccccacccagccccccaaaaccagtattttcttttagagcttcacaatgctgagattttgccctttgactttttttcctttctgctttttgctgtttggcctctttcttccgctgtcctcatacgttcttggctggaggtgaaaccctgggttggctggcagcacggctctcaccccagtcctcattcagtaaggatgaggactccagccaagaactgaaacggcagggtttctgggggaccacgatagaaaattgattcaagctgaagatcttctgctacagcttttagtgtagttgtgcccagaaaaaccactgtgtcctggactgtatctctccactgatgacaaattcttgcctgaattctgagtaccactgaatcatttagctagtatgtctgtgtttttgtgcacagagctccacactgctggcatatttctgtagctctattcatgtcaatccagatgagagtccccatttcctcttcacctctcagccaattcatcagttgtagcctcagaaagctgtgtcttttattgggtggactagccgagctaaaagtgtcaacaggagaatttttcctcccagtactccaaagctgcatcgtcaaggtctccttaaagactctcacatgactggtttcctttggaaatctttctggtttgccaaggctgggctgggtcatcctcctgtgtgttctcagaccatacaggactttcttcaaacaaatgtcacctcatcagagaggccttccatgaccactctatgaaaaatgacccctctcctccccagtctcacactctgtttctgtcccctgcttcatccttccccacacttactgtcttccctactacattgtgacagccatgaggtggtattatagtgtggctcacagctatatttccagcgccatgtatattatcaggctcagccttagcaagcgacaaacatatactgaataaatggtacttctcatgctttctcgtaatggcatattgacttgcctgtatagtatacaaactttcagggcaagtgaactgcttggctgacagttactgagcacttaccttgtgtatggcctgtttctacatgctttacgtggatgatctcattttaggtagatagtattattacctcctttttatagataagggaacagagacatagaaaggataaataacttgcccatactcacacacttagtaagtggcatagttgaggtatcaacctaggcggtataaatacagagcctgaacttttaactattatatgaatgtgtattcccaatacatttttttttttttttgagatggagtctcgctctgtctccaggctggagtgcagtggcacgatctcggctaactgcaacctccgcctcccgggttcaagcaattttcctgtctcagactcccaagtagctgggattacaggcgtgtgccacaaagcccagctaatttttgcccaatacatatgttttagagacagggtcttactctgttgcccaggctaaagtgcagtggtgcaatcatagctcattgtaccttagacacctgggttcaattgatactcccatctcagcctcttaagtagctagaaatacaggtgcatgccaccttgcctggctaatttttaaactttttttttttttttttgtagagaaggggtcttgctatgctgccttgaatggtctcaaactcctagccccgagctatcctcccacttcagcaacctgaagtgctgggactacaggcttgagccatcatacctggctaataattattataataaacatttattgagcacctgctatggcccacatgctattttccatgctttgctcatttaatttttataaaagcttatgacagagacattatttttgtcctcactttatagatgaggacattgaggcttagagaagttgaataatttttccaacatcatatagctagtgaagtggtaggctgaaatttgagcccaggtggacttcacactttcacttctaaccactacagcaaaatgtatgcttggaattgtcagctggggcagatcataagaagttgagaatataaaagattatattttatactcagtgagaagcagttgataatgagcagatgcaggatgaggagaggaagaagatcacatgatgggagactggggaactgggaaatggtggccctttcatagcagtaggaccacaggaagagggagaggctaggagcagaagggagaatgtcagtttcagacatgcagagtttgaggtgagagggtgttcaggcagaggaacccatgaggcagtaggagaaagatgtttatttctgggggaaggtttagggagctatccacagaaaggtggtggttgaagcagtgatactggacttgttccccggaaaaggcagggttgggtgttggacaggagataaccatgtccaggaagcctttaccgacaaggaagaaacagactaccattagcaatgactgagttctgccagtggccccttgcactgactctagaggggttttgaaaattaaaatcctcgagtccttagagcctgaggaaaagggaagcaagactgaagtatttttgcctcttgcctgcttgcccagagtggcggccctttcctctcctacagacacagaagaagttccatgtgcagaatgcggctgtacataggctacgttctgtcttcgagggggaaaggctgctgaggctgggggacctggtagccttggggctgggagaggcccagaggacctgttgagcagacttaggaaggaggaactgacaggtgtcaataggcaagccaaggtcaaggcagcgagcattttccaagtcacaaagggtgcagggcttgttgtcgggatgatttgcagggagactgcttcagtgggctctggtttcctggggccaggcgccctctatcctctagaagagaagtctcagtgcagccccctctccctcagttgcctggtttccagggaaattggggctgggaagacaaggactgtgtggaggctatgaggttgggaagtgagtggtgaccacctcaggatggagaagccgatgggaattgtgggggctaatgacaaggagtttctcatttatgtgtttttgtcaagaccctttgaggtaggagaggagccgacttcacagactttaaatgaattaaagagtacatttcctaagtcctactgtagacggattgcttcatttcctgtcttgaagcaggtcagttgcttttgggagaccgcagtggtccctcggtcttatcttttagatgtggttgaagtaaaccctgccagtttaattaaccactaagcggttcccttcactcctgcctccctccctccctccctctgccagagagagagacaagttctttttcctgagtgttgtggcttgggaaatagagctttagaaccctgtgtttttttgggtaataataaccaaggagcttttgagcctatggttcagtttttgaagttaactctgcagacaattttttccacccctagtgaaataaatattgtaaaatagaatgttcctctccccagttaactgagtaacataatacatttctcagtgactggtaagccacaacgaggacaaagaaaacaaacatttggagcacgttaaatatggctaaaagatagtgaaacataacatcccagaggatgaaatgtttcctggtctgtttatgatctgttcattgagcatttactatttccagggtcctggaccaggccccatgggaccacagaaacccctaagacttgtctaccatagtcccaaatgcaatcattctgaaatctggctgagccaagtaaatagctgcagagggtctggaagaaatgtagtgaaatctgagctgtctggggtctttggagagatctgccactctggttaagtacgtctgcttaataactgaatatttatgcctttcaacaccagcaacaggaatctatctgagacgtatcgaatcttggctttgtcagcatgtaccttttttggtagtagcacagggtcattcttaggaacattaatttttagaccaggctataatacagggttgcctttggctcctttttagaaccttctagtctctttttgaactattctaggctgttgtgcttttggaattctttttaaaatatttttatctttattttttaaatttatgcatatatatggggtacaggagaaattttgttacatacacataatgcatgatgtgatcaagtcagggtattcagctgtccattactcaagtgcagtacatttttgttaagtgtattcaccctactctggtttccttttatctcactgtatgtttgtatcctttaacccacttctcttcatctctttatcttcctcccttccccctgctcacccttcccagtctctgttatctatttttccactctctaccaccgtgtgatcaaatttttagcttttggaattcttgaggttgctttttagagcgtttctgtccccttctctggctgtcagcttttatttcttgctgccagtttgtctgcaaggcagtaagtggcatccccctccctttttatttgctttgtccttgggagctggaatacagaacttgttggaatttacgtaaatggagaagccatagaccctgagagagctgatggcctgaggccttttccttgaggaagctcctggcactttcaaggcatgaacattgtgatgtatattttgatggttgggaggcatttttctgtggcttgctgctacgtttgggctgtgttcctctaccatcctctgcttctgttttttctgccctgcaaaggatgggggagattacactgtgttttatgaggagtcattgacaaggtggaatgctaggtgtggttgtatacaaggatatagctatgtctcctgagcaactatgcccctgagtgtgaaagatactaaatattaagaggtgtttgtggaccagggagagctttatgatgggagagtaaaagggaagggaagtgagtgctcactgaaacatttctgctagactagacgttcaaaaatgtttagcaaagtttctcaaacatactgaaaaggaaaagtaaagtaaaatgaacacctgcattcccaacatccagtttcaaaaatgtatcattgtgttgctgtatttgcttcagaattttaaaataataaaatattaccaaatataattagaaatctcagccatacgtctttgggatcttctcttttctccagaggcatccattgctctggacttggggttgtttattcccattaaggttttttttttctttctgtatatatctttttaatcctgctatgataagtagcattctcttgcatggggtaacttcatattaacgtaatatagtacagtacatagcctactactgacacaggatttttctgggccactttgccagtcaggtacctccacaggcagtgacgctccctgccccgcccaggccttactgcaccccaggtctgctgctggaggcaccctgcccattcagcccacctgtgttataggttgtacccacgttcagtggttcctgagctcttgtcccatgtccaagaagaatgagatatgctgacaatttgaagggtgaatgggggtagagaagaattttattgagtgatagaacagctctcagtggagaggggatgcaggggtggttttctctcccagtgtgtctgggtccagggctttttatggactcagaatggggagtccatgctgattggtttgtgactgtgcaaaaaaggttaaagttgaagacaccactcaaaggtgggcgtgacaatgtagaaaaccaattaggaaagggtaggtatatgtaaaataggtgatggtggggatccatcagaggagagtgcaccaaataagaagacagtttctcaatccagtctgtggatttgacttgtagcttggctttcaggctttaaactgtctttggcttggaggtggggtttcaccggggactcgcccctgtctgcccaggcatttgtctgcttcctggcaccatcactgcttgctttcctccctcactattgtatttgtgggatttatccatcttgacaccagttcattgatttttcactacaacacagcatcagttgatgcactatggccctgttttgcctagcaccagtttttgtacataaaattgtatgcatacatagtatgcctttcatttacaaattgtctgtggctgctttgtgacacaatggcaaggttgagtcattacaacagagacaaaagaccaaacagctaccaaaacctacaatatttactatccggcccttgataggaacagttagccagccctggcattgtaacagtataacacatggtatccattctttataagtaaacatttgagccttttcttttcttttcttttttgagacggggtctcgctctgtcaccccggctggagtgcagtggcacggactcggctcatttcaacttctgcctctcaggctcaagtgatactcctgcctcagcctcccaagtagctgggattacaggcatgcgccactaccacccagctaatttttgtatttttagtagaggcagggtttcaccatgttggccaggctggtcttgacctcctgacctcaaatgatccacccacctcagcctcccaaagtgctgggattacaggtgtgagtcaccatgtctggcccattttagtcatttctgattttttaattttgcaaataatggcttcagtaaacatttttgtttcttcaagagtcttgcagtggctcacacttgtaattacaacactttgggaggctgaggtgggaggattgcttgaggccaggatttgagaccacgctgagcttcatagcaagacccctgtctctacaaaacattaaataattagctaggcgtggtggtatatgcctgtagtcctggctactcaggaggctgaggtgggaggattgcttgagcccaggagttgaaggctatggtgaggtatgattacaccactgcactgcagtcggtgactgagaccctgtttcttaaaaaggaagaaaaaagagtctctctagagaagagtatatagctggaagtgaaattcctgggccatgccatgtgcaccataggctttactattcctaaatgggcctcctaggtggacgtaccaatttgcacccccacttgtaacttatgagacttcctctccctccacattcttgccaatgacctggtactttaagaccttgagtgtggcacgtcatcaccagtgacagtatacattatttcacggttttactgaccatttgctgttcctcttatgtcaattgcctgattacatccttggccctttttttctattgagttatcttttctttttgatttttgagagttctttatatattcttgctactagtcttttgggttatatgcattaaaaccaatctgtgacttgctttttaaacatacatacacttacttgtagacatacacacacataaacacgtatgtggcgtttttccttggaaagtttgagaggttgaaagggtctaagactgaaggaaaagtaagtagatgacagtagtttcagcaaggatgactctgcacagctttccccatcaggacgtttacataagcttatgaacgccccgtcttggagcacttagaatgcctttcccaggctgtctgagtgagcaggtggttactgatgttttggttgcatagatgtgacccacaaggtcctagagaagctgaaggccaccacggtgggatgttgatggacacaagggtttggagagctgccttggacaaaaaccagacgtgatttgtggttttggatttctccatctcggttttggctgaagtcagacctcggtttcagcttgatccagttgagccattctctggcccacagcgatgtcaataattaaaacttccattttcaggccagaccacttttgtttgagtttacatcattggtccatcatcctcaacactgaaagcactggtttcctccatttccccacctctctgacctttcaaatcaaacttttggaattgaatagttaaaataaaaaagtcttcagttcctcagctttagatagcgttgtgaagttaaccaagtccttgcagctgtgatctctgtgtgttcacaacacctcagcgaagcacagggagtagattacaactgccatcttgccgttgaggaccacagagagacgctagagctggtgtggccctgatcctgtagcaacatagcaatcttctgtgctgggcctggcgtctgttctggtgctgtacccaccacatgaatatgggtgccagctcagttcattccccgagctctgggatgacccctcttcatcattacagatgttgctccttgtgggagggccacactctgtaggaccgagattcacataatgaggggaatgagtgtaacattccctgagcctgtgctacatgtcagactgggcactgtacattttcccacggatatcatttgatgtgcagattaatgccgtaagtagcagtatcagctttttggcctgtggctggcgtagccatacagggccagtgcttagcttagaaggggaccatgcttggttttatgttctgctcttgccatcttgagtttttaaaataatttttgacagcagatcccacattttcagtaggcactggacctcacaaatcatgtagagggtcctgtccacagataaagcagctgaggctcagagaggtgaagtaatttgcccaagattaataagtggcagagctgggattggagtaatttctacttggctgaactagttattgaaaacagagccctggaatgaaccttgtttgaatcacactgcaggtaaattgtactgtagaaatactagttttctgtggagatttgctgttgtgttgttaagtagctttgtgctgaccttgtactggccagttgtcacacttcttcttaaggggacggcccagatctgtcatttcttttgaggtctcagaaagtgcctagaataggagcctcatggaggagctgctcagaaaatgctcactgaccaactaggttcatgggcttttttgtttgcaaagaagaaatcgaggctactaagtttaccttagtgagtcataaagaataagtgaggaattaaaaggctgatatatagttagggaactggaagtatcctacacggctgtgggatcagatcatgtcattacctccacagtggcagagaggtgcgtcaatccctgcctcagctactccttctggcttggctttgctccatgtgtcccttatgctaccagccattcactcttgcctcctccaggatatgtccatgaggttcaggttttgcccagacccctcagtggctgctggccagccttcgggttgaccatttcgggtgaggcatttagcatgtcggggtggagagtggcaaaatagataacagagaccagagacttggaagggtgagtagggggaagggaggaagataaagagatgaagagaagtgggttaaaggatacaaacatacagtgagataaaaggaaaccagagtagggtgaatatacttaacaaaaatgtactgcacttgagtaatggacacctgaataccctgacttgatcacatcatgcattatgtatatgtagcaaaatttctcctgtaccccgtatatttgcataaataaaaaaacaaaaatggaaaaaaaaattaaaaagaattccaaaagcacagcagcctaggatagtttaaaaagagactagaaagttctaaaaaggagccaaaggcatccctgtattatagcctggtctaaaagttaatgttcctaagaatgaccctgtgctgtcaccaaaaaaggtaaatgttgatgaacccaagatttgatgcatctcagagagattcctgttgctggtgttgaaaggcatcaatattcagttattaagcagacttacttaaccagagtggcagatctctccaaagacccccaggaggttttagaatgaggcagagtaagtcttgtgtccaggtttggctggccagccttacagcatgggctttgagtctgccagcttagaagataagcttactgcttcctgagcgggacacacgccaggctggaagaagttccagggtccccaagggaacttgctggcctccctggtaatgtgctgtgttttccctctgcagcagcaaaccctctgctttgctccaccgcccgctaccactgcaagaacggcctctgtattgacaagagcttcatctgcgatggacagaataactgtcaagacaacagtgatgaggaaagctgtgaaagttctcaaggtaggaacctctcaagctctaaaaagataattgcaacacaacactgcagtaatggaacaccctgaaaggcagaaagcaacacccattcccattccaaacacaatagctctgttagtttttgcactcagccttgcagcccttgtacaggtaggtacccgtgtttacgtggctttaactacaacacacctaccattttgaattttgtattgttcctgaattaaatatcatctatacatttctcttcaaaactgtaatatgccccaactgtgttacatactgtcatgttactctcctgtggttttctgagacaatgctttattggggcaatccaggttgtttctttcccttgaattacttctttgggataaagtctgcagagtgggatgtctgcacaggtgtctgttacacctcagcatgcagctgtgtttttttttcttttttaagtttacattgctgacatcattgtctgtgcctgtcagttttactgtgctatcacagacattcacaggcatcacaactgctgccctattttttttttcccatttttgctaatttggtagtcatagaataacaacctccccaaatgctttcatttgcatttctctgattatgagcagagttcacattttttcccgtcatgtttgtttactgctttgtttccttttctgtgaattgcctccttgtgtctgggctattgattttggggctgtctcatggaagctgagggatgcagctggaggatgggaagatgagctttgttagggagtctgaggaggacacaatgggataaggtcatgtcctccctagttaaaactgaccgggtacatttctttactcatggactcttttttttagcatttcttcagtgattagaaatactaagatttaaaatgcacatctgttttaaggcatccgaaagaatatatatttctaatgttataaattggtatcatctgtatgtaatctttcctattttcacttagtattatattgctgtgattcacctgtattgtttgttgttggagattgtttgtcttgacttatgttcagtgttctactgtatgattgtaccatagtttatagatctaataaaagtgtgaaaagaaaagtaagagaatgatggttaactgcttagctggttaactcatatattgggaggtaggatagatgatggataagttccatgtagttagatgtaggttattttcaaggtcctagcttttattttgattggtgtttatgctattaaaaatgaacgagtgaatgaacagatggtcatacataacaactggtgagagtgggctacaaaccaaggattatggtcaatctaaatctatatgcctgaggtccataggaaagaaaagacaaaatgtgtattggcatagactttgccaagatttgtgcagagaacagctgtgggaggcgagtcttggatagaattagcttctgattgtctttgcctggaaaatgcctttcttgggtcgactcttcacagtggttctcaaagtataatcctcagtccgggagcatcagcatcacatgagaactccgaaaatgcagttgttcaggcgccattctagaccagctaaatcaactggtgtcggtgggcccagccagaaatgcagttgttcaggccccgttctagatcagctaaatcaactggcgggagtgggcccagccatcggcgttttacttaagaagccctcaaggtgattctaatgcacactgaaggctgagctccaccattctacagtcacctgagagaggtttataatcctgccatttgcctagaaatttccaaacttctgactgaacgcaacgtattgctggcctttacacaagatcaaatttttataaaaccaaacatgccaatgtcttgccagtgatggacaccaaatagggaacaagaatgcaaaatcaagtaagtattagcatagataggaaggattgaggaacattttctatggcgattgtttctttttttggggggatggcatggacggagtcttgctctgtcacccaggctgaagtgcagtggcgtgatcttggctcagtgcaacctctgcctcccgggttcaagcgattctcctgcctcagcctcccaagtagctgggactacaggcgtgtgccaccacgcccagctaatttttgtatttttagtagagatgggtttcaccatgttggccaggatggtcttgatctcttgaccttgtgatctgcctgcctcagcctccccaagtgccgggatttacaggcgtgagccactgcgcccggcctatacagtttcttaagtgtgtatgtatcctggactcacttactcatggtgccctaagacgttcagtgaaaagactcccacgtctaagatgtggaggttaggcctgtcaatagtttgggcaacaccctcttctgtgcccatcccagtattttactgaagcagatttttgcttgcccttaagaagaatggtgggtccctctgtaggctgtttaaagctcctatttttttaaattctgctttttctctctcaccatattccacgtcccataaatatgaggtttatggagaaagttagtggtggacacatacatatgaagcccaactcttgacacatactttccttagaatctcagctttgtgccttccttagccagagggcatccccttagaaaataagctacatatgcacgtgctcccagaaaataaggcccaccaggcagttgctgacacctgtcagtttcatgggtataacagccaccccacaaggtgcccacttgtggaaggcattgctgtgagctacccaagaagagtaacaagaacaggacctgtgcccgttttgcctctcaaatcctgccgaacctacgtggtggcattgtgctctgtacatagtggatttgctaagtgctgaagactagaaaagacttcttggtagagtgttgttattaatgctgtgttttaatttgcaccctgtgtgatattgcaccgtataggtttttaagttatgtgagttcagatatccacgatttattaaaataataacaagtattattattgttgtttaaattgggtagagaattccgtcatttcctcagtgggaatctgccctgcagtgagtgtgagatgggagacagatctggagttcccttagctgtctgcaattctgcagcctcatccttcgtagggtgtacacatctccctgccctgagtgagactctggtattaagggtgtgttttcttgcatcatgtaacctctatgtccaaaccgactaactcattttggtgcttgaccaaaggaaccccagcacatcagtgctgtgggaaaactgacccacactgagctctatgcagtattttcctgaagaatctcagagatagtttgactagacaaaatattgccctatgccacataggatttgacccactgtcatcttttttttttttttttttttgagacggagtctcactcttgttgcccaggctggagtgcagtggcacaatctcggctcactgcaagctccgcctcccaggttcacgccattctcctgcctcagcctcccgagtagctggaactacaggcgcccgccactacgcctggcttattttttgtatttttagtagcgacggggtttcaccgtcttagccaggatggtcttgatctcctgacctcgtgatccacccgcctcggcctcccaaagttctgggattacaggcgtgagccaccgcacccggccgacccactgccatcttaacaatactttttgatgcactgagtactctgctaagcacctctgtacatgagctcacttagtcaaactttgttctctctccttctgctgggtgtgtagcccttaaaaatagatctttgctctcagttatgtgggagaaaatgatattttatcatatttatcttgatggggtagagcaaactggctggctccaagaccagaaagagagtgcttgaaataattctcttccaatttgactagggtatgaaatagtggtttctccactttagcaacaccagtttatgggagcccctcctcctctctctccttatctgggatttagttcccctccttatccttggccttgaaaactaacatacagtctgtaaggaactgggcacgagaatggggccctgaaagtgcagtcattattctgtctttgtattctatatgagatgtattagagaccaaagaaggttgtggtggaactgaattttaattggggcttcattgattggcaacataacccatttccaagaaataaagtaatagctgtggagcaggctttcgatggcttttctgttgcttggaactctctgtgggagggacacatctgagagttagcaggtcctgccatatacatgttgggggtcggcggcactcaggtggccttacaaatgttgactgaatgtggcgggcaacctctgatgatccccacctcctggtattcatgccttggtataatctcatcccttcaaatgtgattagatcttagatcccattcttttggcgtgtgtcaaaatttgtctactgtaaaatttatcattttaaccgtttgtaagtatacagttcagtagatgttaagtatgttcacattgttgtgcaaccaatctccagaacgttttcattttgcaaatctgaaactctatacccattaaaaaataactccctattctccttccccccaggccccgggcagtcatcattctacttctatcttcattaatttggtaactctaggtacctcatacagtggaatcatacagtatttaatcttttttttttttttttttgaagtggagtctcgctctgtcacccaggctggagtgcagtggcgcgatctcagcctgactgcaggctccacctcccgggttcacaccattctcctgcctcagcctccagagtagctgggactacaggcgcccaccaccacgcccagctaatttttttgtattttttagtagagacggggtttcaccgtgttagccgggatggtctccatctcctgacctcatgatccgcccgcctcggcctcccaaagtgctgggattacaggcgtgagccaccgtgcctggcccagtatttaatcattcttaagtgtgtatgtgtcctggactcacttactcagggtgccctaagacgttcagtgaaaagactcccaagtctaagacgtggaggttaggcgtgccgaaggtttgggcaacacccttttccacgcccatcccagtgttttactgaagcagatttttgtttgcccttaagaagaatgacaagtccctctgtaggccgtttgaagtttgcatttttaaatcctgcttttctctcttcatgttccatgtttgtgactggcttatttcacttagcataatgtcctcacggtccatccatgttgtagcctatctcagaatttccttcctttttaaagctgagtggtattcaggtgtatatatgtcacatttggtttatccattcatccattgatggacacttaggttgcttccaccttttgactattgtgaatcattatggtaagacatgagtgtatggattgtgactcgcttttaacaaagaaaatgcagcaaaagtggcggctgtcagtcccgaggttagatgatggagccactctagcattgtcttgcctgccctcgctggctagctctctcccactcttgaggcaagccagctgccatattgtgagccgccctactcagaggcccatatggcaagggacggaaggagggctccaacctaagctagcggggaaccgaggcctgccaatagccacatgagtgaggttggaagtgggtcctcccctagtcaaacagagacatctgcagccccggctgacacgccgactgtagccttgtaagactccctgagccagggtgtggccactcctgggtttctgacccatagaaactgtgagatcataaatgtttgtttgtttaaacctctaagttttgggggtcattttttctgccacattagataactgacatactgaatacttctcaggtgggctccaattctcactgctctaaccacagagagcttgtggtgactcaggtcacagtgatcggtgaaacctttggaagatcatgcaggggtttataagaatagcaaacatttggagtactaactgcatgtcaggcaccattctgagcattattgtattttcctgtacagttctcacagattccctctgagagtgggtgctcttatcacaccccttttctagatgaagaaactgaggaacacatagtttgttcctggtctagtccgcacagggagcaggtggtggagccaggatggggactcggctcatcacactgacggacagactcatgtttttcatcaccccataagactcctgtctggtaacactgagctgggcccaggactttcaggcggtcagtcctactcttggcctgtgagtttatgggggagattagtatgaagactggcatgttttccctctctttgtactccaaaagttttcctttccatgaaaaagaataatgtgcctgtccaccttccctcctcctgaggaatgtctggcagttaagctcttctcaagcagccaccaatgccgggagagttaattaagtgttttggcagtttctttatcttgcttgctgtatcctggtgataaggcttgaggagaatttgaaaagctggctgtgagatttggcacctcactggaagctaacattgacagctttgtcctgttccttctgcagaatttgtgtgtgtgtgtgtgtgtgtgtgtgtgtgtgtgagagagagagagagagagagagaaagacaaggcggtgtgtgtggttgtaagagtgtatgcattcttcaagttggcatttttgtccttggggaggtaatgggtaggtgaggtgttacctcccctgtgccaggcccctggctgcatgcagggatatagaagtggtcttggccccttgttgaattgtcctcctcccccgctgaaattcttgtgttaatgtcctaaaccccagtgcctcagagtgtgaccttatttggaaatagggtcattgcagatgttacttgtgaagatgaggtcatactggagttgtgtggggctctaatctgatatgaccggtgttcttataagaagggaaatttggacaccgacatcacacagagagatcaccatgtgaaggtgaaggcagaaattgggatgatgcatttacaagccaaggatcagcagagatcgccagcaaacaccagaagccaggagagaggctcggaacagattctctctcgcagccctctgaaggagccaaccctgcggacattttgatcttggacttctggcctctggaacgaggagacaatacatttctattgttttagctgcctagtctgtggtactttgttgcagcagccgtagccaactaatacagtccccgagaagtcacacttaagcaaggcacagccattcactaagtgccagagcagaaatatagccaagaggatgtgaaactgccagagagtgatcagagtagagtgcaagagcgaaggaaagtgagcttccaagggagactggaagtgctggatgctgtgtgggaactggacagttgccggtaaagaatccccttggcagggagagctggaagtaaagaatcgcctcggtaaggagagctgctagtaaagaatcgccttggtagggagaactcctggtctgcctatggtgtgggacttggtagagccatgcttggttaggaggacacctcccagcctgtatttcaagttcattttctgtacttggtgcacagacctcattatctctctctacaacagccccagacctggagtcagtggagtcagaacccttccatgttccttgaaagccatggcctaatccatcaatatctgtgttctaaggaccttggacagttgcactttccccttggagttctaatgcctaagttagctggtgactgaccttgatttattgctggattctgggctcacagtgaatatatatgtatctatgagaagaaagaattagggacagtgactgcttcttgccttaccctctcaaatagatacctcaaataaaacctcagaggtggggaaccccaggaggagggtcctaagggctgctaggcagaggggtcaccaaatcagaccaacactgctaactctgtggcttttgtgtcctgcatccgtgatgaccagggtatattgtatatagttcatcgagggaactgtcctttagctactgctgaaacttggagtttggtgtcccttcacacgctccacctaccccaaacccaccaccaccatatggggtctgtgatagactggatttttactttcagttcttcactccctccctctgctgtgtgacctggcagaatggccagaggaaatgtccctgccccgtggatgcggggcttgctttggcccgtggtgtgttggcagtcagcatgagaccagcatggcctcttgcatctcagagatcttcctggagaagaatataccctgggcgctgctggtccaaggagaatgcagtggcacatggaactgacccggacccaccctgcagctcaggatctgtcccagctgaagccagcagagccacagccagcctgcagatccaggagaagccagtgaatctttgctgttgtaaaccactgagattttaagatgtgtctgctacatagcaaaactgattgatattagatcctcaggaaatgtctgtctgtaatttttctttttctttttctttttttttttttgagacagagtttcactcttgtcacccaggctggagtgcaatggcgcgatcttggctcactgcaacctccacctcccaggttcaagcagttctcctgccacagcctcccgagtagctgagaggcgcccgctactatgtctcactaatttttgtatttttagtagagacggggtttcaccacgttggccaggctggtcttgaactcctgacctcaggtgatctgcccacctcagcttcccaaagtgctgggattacaggtgtgagccaccatgcccagcctctgtttgtagtttaacaggtatagtcatgtgctgcataatgacattgcagtcaacctacatatatgactgtggtcccatgaaattataataccatgtctttactgtatttttttatgtttaaatacacaaatacttgccattgtgttacagttgcctacagtgttcagtacagtaacatgccgtacaggtttatagcctaggagcagcaggctgtaccatataacctaggtgtgtagtaggctcctccttccagctttgtgtaagttaattctatgatgtgcaccccatgatgaaatcgcctaatgatgcatttcttacaatatatccctgtcgttaagcaacgcatgactgtatttttgattgctactgtgtgccaggcattatgcccaggagacaaaggcacgtaccaaattttgttaaatcttaaaatgccatctattgtaagagctatcattattttatgttttgctgagaaagaaacaatactgaccattaaattatggcacagtgttgtttttaagatgcattccaggccaggcacggtggctcactcctgtaatcccagcactttgggaggccgaggtgggcagatcacgaggtcaggagatcaagatcgagaccatcccggctaacacagtgaaaccccgtctctactaaaaatacaaaaacaaaattagctgggcgtggtggtgggtgcctgtagtcccagctactctggaggctgaggcaggagaatggtgtgaacccaggaggcagagcttccagtgagccgagatcgcgccattgcactccagcctgggtgacagagcgagactccatctccaaaaaaaaaaaaaaaaaaaaaaaaaaaagatgcattccagtttcagaatgttaaaatgtaaaataaaaattgtatcttagaattgaagaacggtaatagggaaccagacaaatgtggtctctgctctaatagagctcatattctataggaagagcaggtgttcggttggtcagtagcgtgaggaatgtgttgcaaggacaggcgcaggacactctggaagtgaatggcagggcagtcagtggggtgctaagtctttctcaagacaagatgctgaagttgaaaccagaaggatggggaagagttactggacaagagagaggagggtcagcggagaaggatccttccaggcagagagaatggcaggtaagcagatcccaaggtgagaaacagcgtgatgcatttgaggaactggcagatccacgtggctgccctggggtggatgtcaaagaaaagccagagctagatggtaaagcactaaaaacaaactttatctagaaaaatggttgccatcagggaaaagagacctcagtatagaactgggttcaattccaaatataataggaaaagtgggaatttttagccaagcagtagggtggggttagtgggtggaaaattactaagaggaaacatcagggtaaggggggattctgactcaatggacctaacaggattctcactgaaggcaggccaggaggatggtggaggatggtggaggatgaggaacaggatcagatatcaagggtgagcatgtggcagatggaggattttgctaaactgactcatagggcttttgctagaatcagacaatgcagagaggaacgcagaagccccaaagctagggcttctttgagaagagagctcagaagaaccggagtggagtttggtcaaggagagaatctttgtcgtggacgggggaagaacagcctgcagggaagctggagtggtccgtggtggcctgcgtggactgggggcctgggaaaccatgggaaggatgttgcgctctctcccatgggccgtgggaagccacggataagacacgcgaaggtgggggcagtgggaacatatgggggatggcttcaggaagtatttcaggctagaatcgccaagatttgatgacaaactggatgagagtagcaagctgcgttatcaccatggggatactaattttgtggaactagagaatctgccgtattattttctgattgtgcttgctttccactttgctgctccaggccccccactagtctgggtaattgagagtaaaagagcttatacttttggaatagagagatctttgcttttttctgtcaccaaatagaaccaagtgactaagcaggcagagataatttctacagaagtcgtgcagggcatgtgataggagaagtgctaattttagtttagttttccaaatatggatggaaaaagctttatatttaaaaaaaaatagtctgcgtttaggggatccaatcaaaaatgtcacaacctggaatttgaagggtggtcagtatttacgccaaaccttgtggctgcaagtgatgtcaagagcttcattagagagtccgtaggaaagaatcatcacccttaaggaattcctgtagattttcatagaatgaagctgctggaggtccatttaacaggaagaatgtggaagccttttttccacttttaatttagagtttgaaagcccagctgggctgagagaggcaaaaatgctgactccattcgaagaaactgaaggaggctgggagaggttgattgctgcctttgtgtacaggtggggttttcttcttagtaatagagtgtttgcatgacaaaagcttccttttctttaaccacagcagcaggagtttgaagatttctgaaacgtctttcatttagaagcaagtcagaatgattctgtactcaaagacagtagttgcttcctgataactttgttactgcggtaatctttagggctgtttctttagtctcccccatttctttcaggtgcaggtttcccctccttgtccctctccagttggtccctgcctctgtcctagctctctctccccggtgaatggcggagtccatcctggacacctggcagagtgtgattcctcctgaggtggaaggactgagtttcagagcagtcagggatcaggtgtagggcttgctgtctctctgcaagtttgctctgcaagtttctggagccctaagactgctgtgttgtgctgcttgattgtagaggggacatttatccctccatggactgactgctgtggctctcagctccccaacccccaacaccctttgactctcttgggtctttctaacattcgttcatgcacacatcatttgcagagtgcctgcaattgcccggtctcacccaggtactggaagaaatacaaactattatagatcagctcaaagttgctcacagtcctgcaagggagaaacataatagcctgcagataattaccctcaagtgtgataaatgctgtaatagaggaatgagcagcatgccgtgggagcttgaggctggcaaggagtgacagtttttcctagggggatatggcaaggcttcagagaaatgaaatcgctgcccagtctttacaaatacataaaaatggacctgaaaacaaacgtggggctgggcatctagccagagagggaatagtatagccaaagacagagattctgtatggctggagcaaagtgtgcatgtgtatgtgtggggagtgggagacgtgaaactgttagggtgcattgaggctgactgctgggggccccctccctgcaggatccaatgagaaggtggagacagaggaagaaacccaggagaaatgagatgttcaaccctggaaaagaaattcataggagcagctcgttatcactgcatgccgtgagaattctgcttatccttgtgtcttactgagccctgctagcctacaggcaggatgagcctggggaatcggggaatcgtagacctgtgaatttctaggggtgagaagagtttgggaagctcagtgaccatagaagggatatcctccccctcctgcttccaacaagtggcttgaaaaacttacctgggttattcaatcaggtcagttatgtctttttttttggccccagtttgacttcctgatagctttgtggccagtgaaaggtggaaatgtgctctgtgttgcaaatatgtcagttcttgtcacatcccccaagtactccaagcagctctttcttgtttccaccttgttttcctctctggaaacccaccatgttatcagtctgtttcatcttttttttttttttttctttctctgagatggagtctcactctgttgcccaggctggagtgcagtagagcgatctcagctcactgcatcctccgcctcccgggttcaagcacttctctgcctcactctcccgagtagctgggattacaggcgcctgccaccacacccggctaatttttatgtttttagtagagatggggtttcgccatcttggccaggctggcctggactcttgacctcgtgatccacctgcctcggcctcccaaagtgttggggttacaggcgtgagccaccacgcccggcccagtctggttcatctttagttcattttgtggaatgcctctaaatgacacttacccatcttctcccattggttctcttccttgagattttgtgccctttatcatgtgtctgctgctcaaatttgcatcagtaggtcagctgttattgaaaccctcctttttttctttaagaaaatttatttgtacctctacagcagaaatagagagagaataagtttgtgcaaaccacactttatgaaatggatcctcatagcacatcctttttaatgcaggcttgttgttgcaacattattcctggattttcaaaatccagccaacatggatacctctgctactctgaaaccctcctttttgcagagcacattgctaggtgctgagagtcaagagaattcctatgagctgcttcattctagtagcttattttttaattgaagagaaagaccaggaatacacaaccatctctttgaccactactaacttgagaaatgttgcataaggccttctatttaaaagtaaacgtgaattccccatatatccagagtgccaggggacttaatgtatgttaaattagttgccctgtcctcagcaacttccagaccgtgcactcatgacctttggaaggggcagccctctgctctccaagacacctccctgccatctcagtcattgttgaccaaaccttaagtggacaattgatcctaggctagtctgtttatcagctggccagcagcaaatcagaatgtctctttcaaagacactcagggctgaatcagccttaggatgctaagcaaatcattccgtaggataggacacagtcacatagaagctacagctgggaaaggcagaattcatagtagagagtgctggtccacctagaggccagcccaagaggccagaggtggccatccccaaaagagagatggagagagtatttgctttttttcctcagatgttttcccaaatccccaggaagcccagtatctctgccttttcagtgaagcctctgtcttctagagtatgcctttcccttcatttgaactgatttgagtggattgcaagctcttaccaagaatggtcagtgtcagtcagtcatacatggagtcatggaagacctacattgcatacctctgacaaataggaaggaatgggaagacagggaaaaggttcagaaagacagatatgtgcacatcttttgagggacttttgggatctagtttctagggtttcttctatgattctttctcacattaggttcttaatgtggaatatttgaggtggcccagggattctgtattagttagaacatagggtaagctgccataacaaagagatcccatcgtgaagtggctaaaatgagatgcaggttatggcttaataagtgccttcgatgagaaaaagatctctcacttggaataccccagagatgagcagtttaggccaacagggagctctccgctcctcaggaattccaagaccactacagtggttactatttctgagacatcagaaagcggggaagtacagaaggagaagactgaaattaaaaaaaaaagaaagaaaaaggaaataagaaggggagaccaggacagatagcttgatatataagaagatgacctgaaagttatacacatcactttcactgatgatgtggttgcctgatcatgacatattcacatgaccacacctagctgcaagggaggctgatcaatgttttctttctcattgtgggtacttatatcaccttttatatcctaggtgtagaaatcacatagcatcactttttttttttttttttttgagacagagtcttgctctgtcatccaggctggagttcagcagcatgatctcagcccattgcaacccctgcctcccaggttcatgcgattctcctgcctcaacctcctgagtagctgagattacaggcccacgccaccacacccagctaatttttgtatttttagtagagacggagtttcgccattttggccaggccggtctcaaactcctaacctcaggtgatccacctgcctcggcctcccaaagtgctgggattacaggtgtgagccaccattcccagccaacttctgccatactctattgatcaaaatagtcaggactttctataatattatgaaaaggcagaaagggagattggatgggtactggggattgattagccacagtctttgccacagactcttttggactgagccgataggtcaaaggttagcttatgcagtagcatgggctgtaggttttttgcactgatcaacaccggaacttttagaagacttttagaagatttgttgctgctgtgagtgacatcagttcacacagcctgagagagaactctcagtccatgctgtccctccttgggctcactcaagtgaaatgggtcgagctgcaacactgtgcggtgccaaccgggagaaatctgcctatcggggctgagagacatcctgtagtggctgcccgtctcctttgccccaaatgtcaagtggaagaggtgcttcacatatttatttcttcctacatgggctcatttattgtaagcccattgtgacccttggaaagccaagcttttatcttgattttggagtgtgatcaaggtgacagttgttctctggatgacaggaatctgactttggttttgctttttccatagaggtcagttggcctcaaatttgggccaatttgcatctggaggagacctccaaggacagatgccttgtcctcattagctaatttgtcaggcagtctttcctgtgtggcacagaaccttttatagatttttcctcaaactcgttttggttggccagtgcctgcctgcctttctttctggaaatgtgctgtgtatttgtggggacgtgactccatggtgcgtctctcttcccaatacattccctttcccctatccacagccctgttacttctgtctttcttccactctcagtgcagcaattttaaagtacatccacagattctttggcactcctacctttgagaggtacagactgtgtccctacttctggaaactgggccagctattgtgactattttgatcagtagagtatggcagaaatgatgctatgtgatttctacgactaggatataaaaggcgacatggcctcttccatgtccagaatacccctcttgagagcttcagccaccatgtgaatgtggtgccctgagactgccatattgtgaggaagcccgaactatctacacaaagagaccctggagaggccaatgagaggagagagatgcttgggccacccctggctgcttcagccactgctgtcccagctgcagatactgtctgactgcaatgacttgtgagacctggaaccaaaaccaccgcttccttctcaaattcctaaaccatagaaactgtgagagatgataaagatggtgttaaatttggggatgatttgttatgtagtagttgctgattggaacctcagtcaataaaaaggcatctccttgctgcatcgtcagtgtgctcgtcttgatagagaagctaatagtaggtacccattttcagagtcttacttttcctaggggcagctcgaacctttcactggacccccgcttcccaagagagcattcatgtggcccttgtgttcctgaactctgtcaaagatgaccactccctgaggttgcacacgaaggccagaaaggctactgacctcaagctctgctgtgtcatgtttctgtcacacacagctattccttatcaccccacggtcacatccgcaaaaggacgccccagtccctcctcacctcaagcatcatccagcgaggctgtatatggtgcttctgatggaagctgagcctgagtccctgatccctcacttccttggcatgagactgaagcctgagatacctttactttctctgtgccaggcctgtgctaggcatggaggatatggaggagaacattagatgtgagaaagtttttaaaaataaagtccttctgctttgggtataaatctcaggagtaagctagttttgcaaggcctcccccttaccttagcatgtatattaacatattcatgatataaaacattaagagcccaggttctggataggtcaggcaacagctgtaccacttagtagctctgtgattttgagcaagttacttaaccactctgagcttcacaaaggcaaccaggcctgcctctaggattgctgggaggaaatgtgagaaaggctgtccagcacttagcaggtacttctaagtgtgagttccattccccatggaccaccattcccctatataaccagcaaccatcagagctaccagcccaagccattccatctttcgaaaaacaccaaattgaagaaccagatgggttccccagtgtactctgtctctgacagctgacaagggttttctttttcctgcctaccagcaagaagccagcgtcccagcttggttccatctggtatcttgcttcctggcctaacaaaaaaaggaaataccagtggaatgttcacatatagctgggggtgaaaccgaccctcttccaggaaggcggggatggggggatgctcataaggcgcttctattgtctaaagtgcccactataataactcccccaattgtgttcagagaaactgtattacaaataacagagctgaatctcgtattagcctttgttaattcagtgttaggcacctgggatgcatccttggacaagagagactccctgcattatgtggttctcttcatttctagtgattggcacctcagatatcaagggaggagactaaaaaaataaaaaataaaaaaataaaaaaataacaactggcactagtttaaaagccacgtgtaattcttgattagttttcttgattagtttggggaaattaaccatattttgattatttatcaggacaaagacttgccttgtcattgcctgagtaacctttctttttctttttttctttttttttttttttgagatagagtctcactctgtcacccaggctggacttcagtagcgcaatcttgggtcactgcaacctctgcctcccgggttcaaccaattctcgtgcctcagcctcctgagtagctgggactacaggcgcgagctgccatgcccggctaatttttgtatttttatagaggtggggtttcaccatgttggccaggctggtctcgaactcctgacctcaggtgatctacccaccagtgatctgcccaccttggcctcccagagtgcagggattatacaggtatgagccaccgcacctggcctgcctaagtaatcatttagagcaaaagttgtgaggtagaatctggaaggaaagggaggaaggagcctctgagatcagtgatccattctagacaatcacactttgagacatttggcgtagatgagtcaccttagactaatttatggtgtgttttctattagaattgcaaaattctcacacttgcagggtgttaaaatctgacttcacatcatatttaatacatactatatttaaaactgggatatgaactgaaacaaaagcaaaaactagaaagaactacactcgtttgctgacttctgaactgatcttgggtttggccattgtcattttcatttccaccactgtgactctctgtatctcagtaatgtattttggatctgaaccattccatggattatcagaattattaaactaggacaaacctaaaacatcggaacaccccagcagagctggaactgaactggttgttgcctggctccctggttcccacccagcgtgacagtgtgatgggcagtgtgacagccgtggctgctgtggtgtctgcaactgagcttccacttcagctctgctctgattcaggagcagtgtcagtgatggccttgatgccttaaatggtggcttctccgctatgccaatccttcagctcctaatatggtggtaaaattcagattattatgtaagatatctataaacattggtggaaagagctggagagtggaaataagtgtaatcagggctctatggggcagaagttatcaaaggagaaggcaccaaggccagcatcaaggtgtgtttggagctagaagagttgccctggagaatatctagttatagtgatccttaaccaaaggtggtggaaaaatgtggggctgagagagggcatttggaaatgtggatggtgagttccacagtgttggcgtaggggtggagatgtgattggcatttaatcatagggtcagggaaacttaacatcctccatgatagggtagtcttacaaagcaaagaattgtcccactccagataccaatagtactctggttgaaaggtgttagaccaactcttttgttttatagaggagaaaatggagaccaagagagatgatgtaatctgtgcaaggtcacacagctaggaaatggcaagaactgcgaatgggaacctggttctttggactctaaaactgaggtctgttttcatcatgctccttgttaaggggaaaaaattaacttatggtgtagtgattagagggaaacgtctgcatggcattgtatatggtatcagcacattactactgtgccatttgacacacatgtctccaaacagaagtgagaaagtaagagtgagtgtgtgtgtgtgtgtgagagagagagagagaaggagggagagagagagaaaaaaaatacctcattttctgccaagtagaagccctaaactgaactggattcaatttgggggtcctgagcaccactacagaaggtatcagtcaataagtatattattttgttttagggtttttttaacagctttatttagatgtaattaatataccatattaattcccccatttaaagcacacaattcaatgtgtattcacatagttagacagccatccccactgtctaattttggaacattttaattacttcagaaagaaacccccatacccacacacagtcattccctatgaactccctgcacctttccttcagccctgggcagccccagtttgatttctgtttctatggatttgcctcttctagagattttatagtgatagagttatataatatgtgttcttttgtgactgacttctttcacttagcataacgtgttcaaggttcatgtaaccatgggtgtcctaccttttggcttccctgggccatattggaagaagaattgccttggggaattgttagtgtagtaaaatacactaacaatagctgatgagctaaaaataaaaaataaaaaaggttcgtccgtaattttcttgatatccaccacaaaagataagcaaaaaagtcctcacattcaaagaacactcttgattctaacctacagtatgtatcagcttctggatttttttcactttttggctattatgaataaggctgccatgcacatttgtgtgcaagtttctgtgtggacatatgtgttcatttctcatgagtttatacctagaagtggaattgttgggttatgtgggaactctgttttaactctgaggaactgctttctgctattttggactgttttccaaagctgctacattgtttcacattttacattcctaccagcagtgcatgaaggttctgacttctctacatcctcaccagcacttattattctctgtgttgttttttttttttgaagacagctatcctagtggtgtgaaataatatctcactgtggttttgatttgcattttcctaatgactaatgatgttgagcatcttttcatgtacttattgtcacttgtatgctttcttgtgagaaatgtctgttgctgtcctttgcccatttgtaagttgaggtcttttgattgttgagttgtaaaagttctttttttaattcttcagacaattcctttatcagatacacgatttgcaaatattttctctcattctgagttgtcgtttcacattcttaacagcatcatttgccacacaaaggtttaattttgatgaggtccaactcatctattttgttgttattattgcttgtgcctttaatgtcatatctaaaaaccattgcctaattcaaagtgccagagatttactcttacattttcttttaagagttttgtagttttagctcttatttttaagtctgtgattcattttgagttcatatttatgtatggtgggagttacgcatcattcttttgcatgtggatgtccagttgtcccagcatcttttatcgaaaatgttattttttccctcactgaattgtcttggcacccttgtctgctgttttaaataaatacactgcatagactcccttggctatatttctagtctggaaacaaatacacaagtagtgtgtgattgtctctgtcttcatatttagttgggacaagccgaagctgtatgatgatgtaacaggcattttttttttaaatggttagatctcttcttcactgagtgaccttataacaccacacacgtctcctgcagagaaccagtgccaatctccttcaccagaatattttctgctccacagatagtgatagttgtagcagtagttgtactcattggaaactgtcctgtgagtgtttagtatgtgctaggcactctcctgagcactttatgcatattatttatttaaaccttgtgagatcttagactaagttagcacagggaaaaaaggaatttgaaaaaaaaagaaaccttgggggaacctcatgaggcagtgatgagtatccacgttttaccaatgaagaaaatgagacccagaggcattagttaatttgccctgggtcactcagctagtaggtgaaggggccaggtttgaacccagcagcccacctccagatgccagtctacacctccagaagtgagactaaactgcctgctgtgggtctgaatgtttgtgtctcccgcaaattctatatgctgaaattctaacccccagtatgattgtattaggagatgaggcccttgggaggtgattaggtcataagggcagagccctcatcgatgcccttagaaaaggggtacaagggagcacattctgtctttccattgtgcaaggacacagtgagaagacactgtctgtgaaccaggaaatgggccctcaccagaccctaattctaccaggactttgatcttagacttcccagcctccagaaccaggaggaataaatgtttgttgttcacccggtccatggtattttgttagagcagccccaactaagccaccgcctctctagttcactattctgtccccggtacccagggcatcatagacactcaacaaccattcgttgaatatgcaattggatgaaatgaataaacgaccagaggaataatccagacagagcagcagtggccaagggaagggaggattgatttatgggagaaaattaggggaatgaaatccatagaaagggtttgcctaagtgagagtgatgactggagccagaagacacccgggggagaggaattgtttcacatggtaggaaaaggggaggagggagagaggtggggtggtggagtgcagcctcgaggctggaatataaatgaagagccacagagctgatatttcagcctgtggaacagtctgaggaaagtatggaaatgccatcatgtaagcacgtacacccagggcattctaccctgtcctgtaaaacagcaagggcccactttgtccaccaccacaatggcgatggctcctgggaagggtgcgccatgagtatcaaattattatggttcgggaaaataattgctggttgtggaattctggagaagtagtatcgcaaaagagagacatgcacagaagtgttcaggcagggagagctggtttgtataaataagagcttgatgagctatctgttatgatttatgctaggaatccatagcctctgtgcttctcacacagtacataaacccaaaaggtcgcctctagtttggagtggtgatgctgtgccagtgtgggagcaggcaaggccgtgaggccttcttcctcacaaatccagcacctcccacctgccatcgggtaaagagagggagggcactgcaatggctggtgttactgagccctcgcggcatgccaggcactgctcattcgtgttttacaccatttcggaatcctttgaggaagttatttctattatcacaatccccattttacaggaggggaaagtgaggttaagggagacaatgggataggcatgaggtcatccagtaaatggcagagccaggattcgaacccacactcttgtgacctcagagcccaagctcttaactatgccttccacagacacaatccatgcaccttaggatttttacctgaggttcttagtttggtttgggggaccaaaggaacaagtaaacaagcagaaaatgatgaggaagggctgtgctgtgtgcccaagcgaggaagcaaaaggatgggcatgaacaatttgtagatgccatccagaacagagtggtcaaggatttggaggctcagtgcagggggagaagtgggaagggcttgtgctgtacacatgagggttaggaactgatgaagccacctccccaagcctcagattttccatctgaaaaatggaaacagtattcatctccttaattgtgactatcaagtgtaataacgttggtaaagagcttagcacaggcttggcacatggtaggactccataaatagacactgcaattattcgttctgtggttactgcatgacgatgatgataacaataataattactattattattaagcaggaactgttttaggtgctgggaaaccaaaaggaaaaaactccatccccagcccctaggagcctgtagtctagtgaaggagataaacttgtgaacagataattcctatctaactgcttgcttccttttctatgcactcatggtactgcctggtgtgatggttcatgcctgtaatcccagcactttgggagggcatggcagaaggattgcttaagcccaggagttcaataccaacctgggcaacataacgagatcctatctcaatttttaaataaataaataaaataaaatttcatacaaggctaggaaagtgactcatgcctgtaataaataccagcactttgggaagctgaggtgggaggattgtttgagctaaggagtttgagaccagcctgggccacgcagtgagaccttgtctctacaacaacaacaacaaaaatttaaaaatcagccagacatgatggcacatgcctgtagtcccgactgcttgggaggttgaggtgggaggatcacttgagcccaggaggtcaaggctgcaatgaactatgatggcaccactgcattccagcctgggcgacagagcgagactccgtctcaaaataataataataataataataataaaagtgtggtacataataagtattcagcagatactttcaaatgagtaaccatcagtgcttatttttaaatgtaatatgatgtgtgcaacacaagagttgaacccagcctagagctcagctaatcgtagctcaccaagcttagctccattctacaagctggtgcaggtttgccctacctgcttttctttctcctgggagcaatgtgctgccccacagcatggttttctcctggcagtattagaagtacaaaatcgcaagcccagctctataagcatattttaagcatctgctcatttgtcccattgaccccaaggtaagtcacatgaccaagcccaagatcagtggggcagataaatatattctatctccagccagagaggctgcaaggtggcatggccaagtgcacgggtgtggaaagggtgaagaattggaaacagttatgcctctttcacagtgaagtttggagggggagtaggccctagccacaaatgtctgccccttggcctggcagatgtcctgttttccaggagtccagccaggctgtggcacagtgccgaccccctgactcttgtccgagggtctgtgccaaccacccggactcctaaagtccggctgtggctgtagagttgaatattggctgaagccaggctgccttttattgagtctgcctccgcctcattatttacatagactgtaaaataaagcttaactcaaaattaccgtaagtcagcgcatccgagtgaagccggcagctggaccttcacaattgaaagcagactaaataaaagggggaggatgaaaaaagaagagctgcaaataagatgtcagggaatgcttaattatataaaggttatgcatttgcctgcataattgtccaaagcaactgatggcaacagctggcagagaagctggtcttcagctctatttgtgtttatctggtgcctgtcaccgtaatagctacaagaagtattgatcacaaattaatttggcctcattccttctcctttttgtctctacccttatcagtctcacttcccctactaaaataggaaggctattgaatacatggagaaaacttggagtttgtggaggctgaggctaccaagtatcatggaagcaatatactatatgccaggcactagcataggtagcatttgtaactgacttttttaataaaacaaccctataaggtaggtattcttattcctgttttacatataagggtagtgagacccagagagatgaactcatttgacaaaagtcacacagcttggggtagcctggtgattcccttaaccacggctctcccaactgggctctgcaaggtgggtattttgggagttttttcactgcacctggagtgaaatctgaaccctttaccacagactacatgccctgtatgttctaactggtcttcaagcacatcttctcctggtatcctccaccttgtccggcacgctagtctccttttcctttctttttttttttttttcttggagacagagtctcactctgtcgcccaggctggagtgcagtggcatgatcttggctcactgcaacctctgccacctgggttcaagcaattctcatgcctcagactcccgagtagctgggattacaggcttgtgccaccatgcccagctaattttggtatttttagtagagacggggtttcgccatgttggtcaggctggtcttgatctcctggcctcaagtgatctgcctgccttgacctcctcatttccatttcttagacatgccaagctctttcctgtttaagggtctttgcaggtgctgttacctctgcctagaactgtgttcctgcaaggtcacccgttctaccttagctgtttccctcctcacccttagtattattgttcacagtgtccagagtgtttgttccagggcagttatcatacttatcagttgtgcctttatgattgtgggtctgcactctgatctgtgcattccatgtaagcagggatcatacttgtttcattcacttatgtgtacctagatcctggtacacagaggcagtagagtgcattagagcatggtctctgaaagcaacttcccgggttcaaattccagctctgccacttattgtcgactatgtgacttttaggcggatgactttctctttctgtcctcgttttctctgcctgtaaaataggaataatgatattgttgtgtagaatgaattaagacataaaaatgctttgtacagtgcctaatacgcagcaagcagtacatgtttcactgctgttagtcatcatgattaaaatcattagcacatagtagatagtcaatgtttgttgaatggatgaatgaatttctaatcgcagaagggtaaacaggcctcagctggtcgatggggtgagtttgtaagctcagtgtgagactgctccatctgagatgacacggtgatcaaagggttgttctttaaggtgtgctgatctccactactcggcacccaactgcccaaacagtgctgtaaggtgaacagatttgggagaccactttttgtgattccgtaagttattttggtggaggtggacagagttttggtggtggagaatggtgtcttcttgctcctgcagtgcacaagatgttttcaagccacatggagggtgtggctggtaggctctatggtcctgttccgtcccctcccataaccccctcaacctgatctgctgcaaaaggctaccccccttggaaggcagctgatagagaagctgtaggcttatgctgggaccccaccagggacaaatgaggccgatttggagacactgtggaaccaggaagtcagtctgcacattgtgatctgcgcctgcgatgctcctccccacccttcacgtacagtgctgtttggagggctcagtcctgctttctgctctcctcttgcctttggttctcctttggcaggatcccgcaggaagcgttagaaccccaccactgctcccgatgccttgcttctgtctgctgctggtccccgctgcctgcactgcccgccccctcatcacctatctctgctggcctctcaagggcactgcattgtccttcagttcctgggcgtgaatctgctcatcaggcaccatttaccttctccagccctgtgccctgttcctaaatcaaggcttacacccaccaagagcagggtttcttttatcccactgtaatcactcctaatgtaatcaatatgctcagatctcttattggagagagtaagttatcaccaagacccctgccagccccatttcagccaattccagcatgcagggaagaggttgaggattggccttcggtgtggtcagggtcgggaggctggtccccagaagaagccagttgttggctgtgcctttggggcagcggagtctggagcccggatcatccatcagggctatcagccttgtttgggtttttcagtggaagctcattcacgtatgcaataatgggatgctgggtggtctaagttgccttttgatttttagtctccgggaactccagtgttcctggtgttatttggtatgtctgtggctttaatttcctttttaatttctgttgaaaggaagaaagaactctgtggagttataatctgcagagaacctatgttgtaagaccagtgggtgtcctgaatggctaagtaattagaacatgcataatcacccagagttaaacccactgccgagcaagtgcatcctgtgaactcgactgtgtaaacaaaattgtgcagaatcagcccaaaaggaaaattcaacaaatgtgagcagtggtcatccctggtggtggattgtagagaatttaatgtctggttttgcccatttttcagttttttacactgagcacattactgttgtgttttgaaagaaagacacgcattaaaaaataaccaacacctgtattcttgtcaacacttgatcttgcaatcttaatatagaagactgcaaaaaaatgactgttagaagctaaagatacaggtttaaggaatgtctttactttattgtttatataatgaaatattaatataataaaactacagatttgcatatggaattggggttaaacagaggtttgaaggattatcaattatgaatagtttatggtgaaagttacacaataaaacagtactgagaggaaggtgtttttcacttatatatttgaatttatatagtacatgctgtttaatcctggctggttccttaaatctcactttgtctcagtttcaccatctgtaaaattggggtactagcctgttaggttatttttaggaagatgtgattaatatttgtgaaattcttagaacaggattggaacatagtaggtactcaagaaatgcttgatgctgctgggttagtcttattgttgtgatacagaggctttgacaacagtttttgctcctacatcagaagtaacagtaggtaaagctataatgttagttaacctgagtagacttcttaccatgtctgagccaccatgctaagttttttatttaggttatgtcatttgctcctcaaatctgcttcatatcagtttaggatgtaagggctcagagaggttaagtgacctgcccaagatcacacagcttgtaagaatttgattccaaagctcatgctctgaatcactgttttattacctagtattgtattttttgttcttctgcaggtacccaaaatatgcacttgcctttactttccctgggtcaaaggtccaccagttgaggtgttttaatgcccttccaaagatatatgttgggaatttctccagctgtttccccaaagcagcctcctcctggtggatgtacaccgaggaggcaggagctaccccacactcactgatctgaggcatcaggtggccgggaggttcataactcaactgttgcgtattgatggcagagttgtttttacatatatatatatatatatgtatatgacatgtaggcaattaaacttagaatgggaactgaaagatgaagaattaattccctgtttgtttgtaatactgtgtgtaggcaaacaattaatcagcatctgtataaataccctccccataggggtctggcccagggacagggagctcctctgcctcctgctagctggagaatattggtccatctcacgcatttaaccgcaatttcttctgcccagccttgtgctggatgcttcaacaagtgaagcttaccaaaccaccatgcacagatgctccccctgggactcgtgggtagagatgccagagggtgccatcataaaggactgtagaagcccgtgcacctgggaaattggactttatctcgagagcagtggggagcccaaagggcagaactacaatccagtttttaatcagaaaaaccactctaggctgggcacggtgattcatgcctgtaatcccaacactttgggaggctgaagtgggtagattgcctgaggtcgggacttcaagaccagcttgggcaacatggtgaaaccccatctctactaaaaatacaaaaattagcctggtgtggtgataggcacctgtagtctcagctactcaggtggctgagtcaggagaatcgcttgaacccaggaggctgaggttgcagtgagtggagatcacattactgcactccagcctgggtaagagagtgagactgtgtctcaaggaaaaaaaaaaaaaagagagaaaagaaaaatcaccctagcatcggtggaacagtgatgggcagaggccaaggttagtagagagaccctggctgggatgctacctttgtagtctacatgagggatggtggtggctttccctgtgagatggagggaaatggacaaagtcaagagatgtcagggaagtagaagtacaggtctcaatactagatttgatgtttggggagtagagaggaataatgatgagggaaccagcccctgcctccagctcgagagatttaatagaccttcccagatagaaatgtcccggtcattgtgtgggaaggttaatttagaagagcatatggcatttgttctctgcctgcttctgagaagaacactattagcccttttctaagtcctttctaaaacaaaaacaaaacccaaaggatttggcttgcaactgtcgatggcagaggctgctgcaagcaggacttggtgttttgctgattcgaacattgagcagaggtatgtggtctgggattccctgtgaaatcagccccagagccttcatctccaatagcctgtgccaacctagaaggccaatatgaaagttgaacgaggaactaggaatggtcctgtcccagagtcccttcagaggaggtgagccagtatcaaatccgaccttgctgggaccccaagggatgttctgcactcagattttataaatcgtcctttgtgccaggtcccttcccgggagccacaggcatgacttaggttgttgcgtggattcccttacctagggcatagagaggccatgcaattgatcattgctctgaggcagtcagaaaatgtggaaggaggcatcccagctgaaacatctgccctaagcctccttcttggccctaaaacctgcctggaatgttcaccacccccaacactctccccaatccacccacctcctctgggtctttgctcagtgagaccttccctgaccaccctctatcaaactgcatcttttcccttccctgctatatttttctctgtagtatttatcaccactgggtgtacactgtccttacattcattcttgttgtttgctagtctccctctgtaagataaaagctccaggagggaacttccgtgttttgtttgttgttcattgcagtatcctcagcccccatagtggtgcctggaactcaggaggggctcagtcaatatttgttgaatggatagtaatagtaatggctagcttttatcagctgagaccctatgcttacagttcactgaagagttgagagacaggcattgaacaggcaatttcaagtgtgatgattcgtgtaaggaaaagtgtaggacacgatagtagcacggtgggcttccctgaggaaggggcatttggctgagacctgaagggtgataagaccctgaagagaagagtcttcccggtggagggagcagcatttgtgagggcataaggtaaagagaatggggctgacgggatagaactcacaaatgaagtgtgcagaggcttgtctggatgtgtccacgggggctggaaggggctggattttagaaaaagtattaagatcccagccttgatcctcaggacagcgtgaggccatcaaaaggttcggaaggaagtttggagggcagaaggctggagggaatgcttccttgcccagatgaagcctgaatgactcgcagggctggggcaagctgccgccagttttatccacaaagcagcaaccacttctgctaagatagtgatgactccgagcccctccagctcccctgttctcctcaaccctggtctgagcgcctgctttgtgcgagtcattcaggcttcatcaaggcactatgttaatgttaggtccttcttacagatcagcccacgtagtcctcacagcagctggttgaggagctattatcatcatccccacttggcagtggtaggtagaggctgaggctgagagagttgcccaggttcactctactggaaggagccagctctggaatctggaattcagccccaggcctctctcagtccaagtccagtgcgcactatctctttcatggactgcctcccattctcaggatcctaatgtctttatctaaccctgctggtggccagaagcctctacctggtacccgtcacaacccaggtgagaccaggcatctcaggatgcctcacctgacttccagctggaatccaacctgagctgtgcagttggctcaaagggtggccaaccagaggagcagatttatccacattggcatcagaaaaaccactctaggccgggcacagtggctcatgcctgtaaggctcatgccttgagaggctttccctgttctcccagctctcaccccaccaccagtaatctgtgcttaaacgagctgtcttgcctttccacgcaaatgaattggagatggtgaggctccaggcagcagcagacgcatctcaaagctggtttggggcataagagctttctctctatgagaataacctgcttcggagccttctcaaggatagggaggttggtatttatataaagtgaggttttcgaaatgaacagaggtatgagctgcctggcagtgtcctggaacgagccagtttgtaaaataactacttttttgttgctttggggctagaatacattataccagagtaagagatggtaactgactacattattgtatttatttcttaggaatgaaaacactatactattcctattattggggatgctttgccttttaaaaaaattatggtgaaatatacataacagaaaacctactgtcttagccatttttaagtgtatggctcagtagcattaagtactgaattattgtgatgatttgccttttgaaatccagaaaagaatacctgggtgtattttgtccaagcatgtaatattgcttccttgactcctatttatagtttctaacatttgcatggtttattccagtttgtatagtctatatcacacatcttgcctcattgaacccacctggggcctggggtgggctgggcaaaggaccagaggagcttaggtgctgggtggtctttgtttcgagcatgttctagtgccatctagcgtctgtgggaccttgtgctggccaggctaaggctgttggatttcccctgcttggggcgatggctctgtaaaacccaaatagctttaaaagagcaccaaggagatgtttgtctttttaaatcagctgggatttttttttttttccagctctgatcccttggaaacttacaactaaaattcatttcattagcagtcagaacagtgtgtccctttgaagttcagacagggtgagattaatatgaacccgatattaagctattaagcatcagtttgccaaacctatttataaaggagagcggaagacggaaaataaaggaggctgcattaagaggctcctttgccaagtccactgtctcttgttggaaaatgtgtctcaataacccgtttttgtgtgagagaagagaaaaagaaaacgtgtgactgtgtgtgtgtgtacacatgcttcaatgatgtgtgattatctaataagagcaataatgcagcgtggctaaacttacacagtgttgactgtgtgcccaacactgttcttagtgctttatatttaaaatttgttaaatcacacaacaacccagaaggagtaggtgtcattatttccccattttatagatgagaaaactggggcacacaaaggttgggtggtttgtcaaaggtcacaaagccacagtaaatattttgtgatagagaaattgttcaggactcagaagcacatggatttttaattcgggtttcaggtgatgttgcgttttttcttcctatccatacatcacttttgagcgccttacagtcccgataggagaggaccttacatagtgcttgtcaagtgaatgcagcggtttaagcccatgtggggtttttggcttgttttaacgcactcataagtaacgtactcatgcggggccgtgtatacagagggaagagcaccacgttagtcagcaggtttgagtttggtcctcagctctgtggcttcccagccacgtgaccctgggcaagtgacttcctctccccagcctcagttccccccttttggggataatagaatgagttttatagtgttttggggtttttattttgagaggataaatgagatactgattaaaacagcctcttgtctagtgtttggcccatggtatgtgctcattaaattttacctttgtttaccttttatctggaaacttaaacttacttagctctccttttgcattttctggcatctcctgcagtgatgattcatcttccttatggcctaagaaggccaagtccatttgtccattttcttttttcttttttttagttgagatggggccttgctatgttgtccaggttggtctcgaactcctgggctcaagcagtcctcctgtctcagcctcccagaatgctgggattacaggtgtcagccatcatgcccagcctgagtccattttcttttcctttcttttcttttcttttcttttcttttcttttcttttcttttggaaaaaactgagacaaggtcttgctctgttttccaggttggtctcaaactcctgggctgaagcagtcctcctgcctcagcctcccaaagtgctaggattacaggcatgagccaccatgcccagcccaagtccgttttctttttcttttcttttttttttttttttttgagacggagtcttgctctgtcacctaggctgtgtctcagctcactgcaagctccgcctcctgggttcacgccattctcctgcctcagcctcccgagtagctgggaccacaggcgcctgccaccacgcctggctaattttgtttttgtatttttagtagaaacagggtttcaccgtgttagccaggatggtcttgatctcctgaccttgtgatccgcctgcctcagcctcccaaagtgttggtattacaggcatgagccaccgcgcccggcccattttctacatcgaaggataaaatggtccagttctgcttgggtgtgggttcttaaatgtctgttctagttgaaagaactgaaagctgagaaaaatctggctttgttccttcttccctctttcagatttccaagtatatatatatataacatgtatgtatacacacacatacacacacatgcatgcatagcgacccagataattttggatcaagtataacaggaatggagataaaatcagaaggacatcagacatttggatgggcaaccagacactggggaaaaaatcttgtttgtctgcatgttacctcctacaaggcaaaaatcataatatcagcatcttatggaaactgaaaagggagatccggagaagcttccagaaagcagggggatacattgaaatgcattgtacactcctaatgattgcaattttaagatgtgtaaagtgttactgatagtctccttaatatgcagtgtctgttgtcattaggtattaataagcactaatgatattaataagcacttttatcagttcctgtaaaaatcgagttttcctgatcttatttttcctgtcatgtcttaggctgcttaatcatagattctcactccatagggtctgcagcatttgcatgtctgaaggaagtggtttcttcatccagagctctcaagctttgagagggaattttacatatcatcttaacagtggtgtgtgggaaatgagatatggcatttttgttcgagggaactcttgtaggcccccttcacatctcatggagaaggcagcagtgtagtttttgcaagcctgagcccagcctttcagctgaaggtagctgcagccacattgggcatctgttacggacctcattgagaaatggaatcattcattccctcttgggctcattcagttgcagttatgtttaacttgcttttgagaacctcccctcttgctgggaagtctgtcttttgatctgcagcaggaagaatagctcagaattggcaagttggtggtgggtgctgccggctctctggggaccaggaggtatcatctgcctggtaccatgagggtattaaagggggtgaaacactaatgacttcttccagctcccctgcctctaggtttctctcctggttactcttatgtccccagttctccactctcagcacccttcttttctccattttccctgtttcccctctctctttccctcctcttcctcactgttgtaggtgcagcaaaagaagagtgatgtttggtggatacttgggataactgagcttccaccttcttttgactcagcctggagatgcagcctctcaacttttctgtataaatcatttaaacacacggtttaataagcacagagttttgctgtggcttgtctctggtctttcagatcaaagccagaagtccagggaaatgtctgggaaaagtcgtgcctctgcattccagttctgtgcattttgattcttgaaagattgattgctggctttttgccctttccccatggctggggtttgggaagattctggagagttgttatttctggcccctaagccttgaggggtggcaacaattctgaccttgctttccttcttcctgccttctgttcccattctgagtcttctcattatcctgagtgtttaaaatgataaactccttcatggcatcacctacccatctcccaaaacagtgatttaaaaagcatgaaaaaccccaggtaaaatgaagtcaaacagatttctttgttttggaactactacaagtcttggatgctttagaaatccgtaagtggggttgggcacggtggctcacgctgtaaccccagcactttgggaagccgaggcgggcggatcacttgaggccaggagttcaacaccagcctggccaacatggtgaaacaccgtctctactaaaaatccaaaaattagttgggtgtggtggtgcacacctgtaatcccagctactcaggaggctgaggcaggagaatcgtttgaacccgggaggcagaggttgcagtgagccgagatagcaccactgcactccagcccaggcaacagagtgagactccatctcaaaaaaagaagaagaaaaaataaatccctaagtgggagatacagtatttggcattttccaaaagtacccaaccaaggaattatttcttggagttacatctcgtggatcaacactaccaacactctagctctgaaggacctgctagcattattccttcaggataagatattccttctatataacccagttcatctgtgcacatgaatctgtgtacactgagtcctgtgctctatgccgattggccttcatgaatgtgtgctgcagggggcatgctggcctatctcagaaggattaagttgaggcataaaagcctgagtgcccactgtgcaccagatgtttcatatacactgtcttaggtagacttcacaacaaccccacaaggtagatcctgtttttcctatttcacaattgaggccagtgtacagagaagtaaagtaagttactgatacagtttggttatttgtccctgcccaaatctcacgttgaattgtaatccccagtgctggaggtggggcctggtgggaggtgtttggatcatgggggcggatccttcatggcttggtgctgtctctatgatagtgagttctcttgagatatggttgtttaaaagtgtgtggcacctcccgccagactctgtcttacttgcttctgctttcaccatgtgacatgcctgctcctccttcaccttctgccatgatggaaagtttcccgaggcccacccagaagctgagtagatgcctgcaccatgcctcttgtaaagcctgcagaactgtgagccaactaatcctcttttttttttttttgagacagagtcttagtcacccaggctggagtacagtggcgcgatcttagctcacggttacccctgtctcctgagttcaagcaattcttgtgcctcagcctcctgagtagctgggattacaggtgtgtgccaccacagctggctaatttttgtatttttagtagaggcagggttttgccatgttggccaagtgggtctcaaactcctggcctcgagtgatccacctgcctcagcctcccaaagtgctgggattacaggcatgagccaccgcacccagcctaaacctcttgtttataaattacccagactcaggtatttctttatagcaatgcaagaacagcctaacacagttacccaaagccctacaactagcaaattctggcagggccagaattcagcatagatattaggaagaggtccatggaacataactcagccatgctaagcctcatttgtcactggccagcaacctgaactgaggttgaccaggaaatggatttgtgatgggaccattctgtcactgtttgtgtatgtaaataagggacatctctgacacctgctggggtagccagaacatttaatatcctttgcctgcctgaacaccttttcagatgtagggctcaattcacatacctacaagttcagtttttacccaaccaacttctaatgacataatctcatgagttcattttatctgtaacctctcatcagaattagcagatcctctgcaatttgggaactctggacaaaatccaggggaaagattctgaaggtgaagcattcaagtctagcagtcctaatggaaacagtgtaatagcaacatgccactcatctgcagtcagcctggatgacttaaattggtttccaggaggttgaagtttcatgagaacagctcggcacagctaagctggtattaataagcacattgtgcccgtggacaacattgtagatcaatacagtatatgctccaaattcacatgatagatgagtaccattatgacctaattagcaagccttatattttgaatagataaatagtaattccaccacataatcctaaaccacttcttgaaaaacgccgttgctgccgctcttccctgctgcagagatgaaggcagagtgagcagaggaatgggtaaccatttacatatttatttgcttctgtgatgggtaactgttttgtctgtattcacagacgtctctagttcagctgtgctcattattttttaacatgagataagaggaaagtgttcagtttttttaaaagtcaaaccacatcttaagggtggaatttactgggccatacgtaactcaggggccctttaatctgttgcatttgaggtgcatcaccctgagtgcttgaagatcagggagttgggtccaaggctggcagtgacaccagcaggctgtcctctgcaagggaaccatctattgccttgtgggcaagaacatgggctctggattcagagagatctgggttcaaatcctgactctcacctttcttaactttgtgaccataacatttctgaaaggcaagtaaatgggattgctaatagtacctacttccttgggtggttgggaggattaaatgagataatgtgtgtcgtgcctagcacagtgcctggcacatgatgcgggaatagatcagttagtttttattgatagtctcttttatcttttgtgcaataaagtagtttgaccaaatcaaagagtcccaaagtaaggtcttgacaaacatattggtggaggtggctctcagactattttcagtattaattagaagtgcctgatgtctttgcctttgactggactcactccaacttcatagcaacacccattatctcatggaggtcagaggcttggtttggcagtgacatttgtttatgattagtaaaaaatgggaatcatattaattagtatttaatagctgcattttggtgacagattttgctaccaagctgcccttacacatcttacttggaaaatgcctctggtttagaagatggcagttgtcagaacatgtgatgcttggggggtttgaggggtaggtggacattgaagatttgtggtggtagaaagtttaagacccttggtctggatggtgttttctagttaaccttctctgattctgtgagtcctgcctgtgcagagagcacagtaatagggtaacatgtaatccctatgtaatagggaacctgactgtttacctatacacaccttgcctaccctttcttctcccacccattatgccctagctggtggccttggcttaagccagataaatgtccttataatctcaggaaaatgcaactctcacttctactccctgctatccctgtgctgccagcctgcctggaatgctcttctctctttgtggccctactcagggttcctttagcttgatactgctggtcttttggactggcaaactctttgttgcattatagaatgttagccagcatctctgaggtctatccattagatactagtagcaccctggtccctaagttgtgacaactaacaatgtctctaagaccttgccaaatgtcccctgggagtgggggcagacccaacttaacatcctgccttctccatgaagacttcagttccagtccgcataattcatccgtcaattatagatgatcccaactttggtctgtgtgtgtcttcattttgtctccccattcaggtctcactgttaaagagtttggaccacattgtaacttctctgtctccacagagcagatccttgtttgctgtattgatttttaacaagagcctcctggcttgctgttggttgccatgaattgagcacctgatgtttttcagtcgcttcatgtatattttctctaattcttacaacaaccctcatcttaacaggaaagatatctgaggctcagagcgggtaagtaacttacccgtagtcacacagctgatgagtccaaacctgtgcgcttccccataaaccaccaaaccctgccagtttcgggagggcagcaagaaggcagttggtgtctctgtctgtctgtggcctgtgtttaaattatctccaggagacgagggtgaagggatagcgtgggagtgccctttgagaatggatgttgggaagaacctagtatggaaagaatagggggcaacctctcttcccctggaaggcttggcaacaggaatccagccgaagtgaatgtgctgtgggtgtagagctgggcactgattggttcttctgtggcagccctgaaggctgagtcaagaataggtcagccttacatgcttggagatgctctggaaaatgacatatctcttattgggctaagcaccatgctagggaaaagtaaatattccttctggcagccatgaaaagaacagtcagcagtgatgagcaggacaagggaaatgatttgttttgtcttggaaagctgtgtttgttacctctgaatatggcatgtttgttcttaacgaagacttacctgggcagtttgcagaaggggaaatctggtgaaccatgagcctatgaggggatgtgcacttcttctagtaggcagggcaaagtaaaccaaaatggcaggacccttctcacaccagagaataccttggcctgtgtagaagaggatgcgcatacgctcattcatatcctcattgttggtaatgatgaaaaattaacaaaccatctaaatgcctgtctgtaggggatttgacaaatcctgtgatggaataccatgcagcacatcaatttttgagacagggtttcactatgtcacccaggctagggtgtagtggcactatcacggttcactgcagcctctacttcccgggctcaagcgatcctcccacctcagtctcctgagtagctgggactacaggtgtgcgccaccatgcccagctaattttttgtagagatggggtctctccacgttgcccaggctggtcctgaactcctgggatcgagcgatctgcccacttcggcctccctaagtgctgggattacagacgtgagccaccgtgcctgacgttgtgtacactttaaaagcatatggaaaccaatattatttatttatcatagatagaaatgtgtctatgaaagtattaaaaatagactttcaggttgcaaaacaaactgaagaaaataattacctaggagcacgaggggtgagcaggcaatgcaattgaagtagataaagcatccttctttgccttatccgaaaggtactactaatgtgaaaaataattaatggaaatgtgacaaaatcctagctggttttaattctgggtgctgttgagctttctctctctctctctctctctctctctctctctctctctctctctctctctccgtgtgggggtgtgcgtgtgtgtctgtattttaaaaaatggttccatccaaaatggagatatgcgtggtactagccctgcttcctgtatgggctgtcatggggattcgatggcagtaatatatgtgaaaatgctctgtcaactaggaagcaatgcaaaggcaggataatgtttatttaataagaataatcacctatcgagtttttctttggtccttggctaagtagctttgtagcatttggaggcttgggagagtttgcagtgatttacactctccataccttgaagttcatgttcgtttgttttgtaaaaactccccagagcacacagcagagataaaagtaaagagaaagcagggatcgaatttttatgtgcgtcttggaaggctggggaggatgtggaagcggatgcatccctccgggaaaatggagacagctgcctgaatggaaacccacagccccatccctgtcctgaggtctggggtttgatcttgtagtgcatctgatcaactttagtacatgcttactgggtcgttggtctaggcagtagccagaataggagaatttggtgggggtgggagtagggaatcagtcagtaaagggagacagggatgggtgaagaagggatgtacgctaacccatatagatgaagggcatgttcaaataagtagtttctatggcaacacgtggagtgagccaggtgcccccggcccgagcagacaagcaggctctgaatggagcactctccattacctgaagaggtagctggctggagcagccagggtcacaggaagtcagcagaatagttgggtggaaggcaggctaaaacacagtgcatagcctcatctgcatttctgaaggcaataaattcccatttaagctgcaatatcgatctgctctgtgaaattgcagtatcagaggttgttttcttttttttccttaaccatacaattgggacctttccctgaatctcagacaggatgtgcaggctaacttgttccattttctaaggaaaaataaaccactattgcttgcttccagtcgcctcccccttcttcacttttggggaagccatccagccatggctggggtttccggacagatggtgcccatccttagcagcctctgtggacctccatttgggacactctgaatgcagtgacacactagagtcactccttagtttctgacctctctgatggttttactctgatgaaagggtagactgcagtctccctcattcacacatcccagctgtattaagtgagctgaagaagacatagacacaagaatatccatgtgcctgtttgttcctactctgtagttctgctgtgtgtttgtgatttgtcatcatattccgtttagtagctgctggtgaaattttgaggttgaattcttactaggacaactgttcacctaccagccttaaacctggctcctcatgaagtctggatgtcctcaaccttcagcacctcttagccctttagtctgagtggaagaggattcggttacttgatccacagtgcatgctgaacccactgtctggttcccgcccccgcctcctgcacttagtcttaagcacaaacgtctaaaagaagccaggtgggaggggcagtggtgcacccggtgcagccggtgaagtgagactcacactcattggagggcacgtgccacaccaaagggaagcccccaacccagctgcagccaggcattttcaagcaggagggcgctttctgcattactacctcttccaggttatctaaaggagccagaggttggaatttctgtgtgaaagctcttgatttttaaatattgaaggaaaaaacaattggaaatctgaaagcactgtgcagtcacgcaaaaatccagctcccaggctcatggaacccaggggaaaagaggcaaaccaccccaatgggatttaggtacatttgaaaaaggagccaaattggtgaaccttttcattaatatacataacaaacattgattaaacacgtactatgtggtaggcactatgctaagtgcttaacattgcagatgcatattcaccagtgaggcgggtggggttaacttcactttacagatgaggacattgagtctcagtctgggaaagcattttgcctggggtcacctaggagtgatcagaaccagcatctgaacccaattctctctgtgagcctgtgaacctgttccccaggcacaacgcgctgtctccggcagccttgcttcccctgcttaaaagtcacaaagaactccctggccagaaaggaaacccaaggcctggcgtcctctacctctttcccgtggtggccttgaatgagaaaccagaagaagctggcacatcaggtgaatgtggctttgaccactctctttctccacggttcagggcggaccttcttccaaaaatagacttgccaaaagtcttggctgttgttagctcagaaataacctcattgggcaggaggatcctgtacctggaaattatgtattttcccacttcctgtttgagcccagggagaatgccacaggaaaaagagaaacaggtatggagactgtgtgttccagccttcctaagtgtattagttggctgtggctgctaacaaaataccacagactgggtggcttaaataacggaaatgcatctgctcactgttctggaggccggaagtccaagcacaaggtgtcagcaggtctggtttctcccagcaccccttttttttggcttgtagatggcatctccttgctatgtcttcacattagattagagcccaccctacaaacaaaacaaaacaaaaacctcattttagcttaatcacttctcgaaagaccttgcctccaaatgcagtcgcattctaaagtgttggaggctccctctccctctccctctccccctccccctccccctccccctccctctcttgccacggtctccctctgatgccgagccgaagctggactgtactgctgccatctcggctcactgcaacctccctgcctgattctcctgcctcagcctgccaagtgcctgcgattgcaggcgcgcgccaccacgcctgactggttttcgtatttttttggtggagacggggtttcgctgtgttggctgggctggtctccagctcctaaccgcgagtgatccgccagcctcggcctcccgaggtgccgggatggcagacagagttgcgttcactcagtgctcaatggtgcccaggctggagtgcagtggcgtgatctcggctcgctacaacctccacctcccagctgcctgccttggccccccaaagtgccgagattgcagcctctgcccggccgccaccccgtctgggaagtgaggagtgtctctgcctggccgcccatcgtctgggatgtgaggagcctctctgcctggctgcccagtctggaaagtgaggagtgtctctgcccggccgccatcccatctaggaagtgaggagcgtctctgcctggccgcccatcgtctgagatgtggggagcgcctctgccctgccgccccgtctgggatgtgaggagcgtctctgcctggcaactgccccgtctgagaagtgagaagcccctccgcccggcagccaccccgtctgagaagtgaggagcgtctccgcccggcagccaccccgtccgggagggaggtgggtgtcagccccccgcccggccagccgccccgtccgggagggaggtgggggggtcagccccccgcccggccagctgccccatctgggagggaggtgggggggtcagccccccgcccggccagctgccccgtccgggagggaggtgggggggtcagcctcccacccggccagccgccccgtccgggagggaggtggggggggtcagccccccgcccggccagccgccccatccgggaggtgaggggtgcctctgcccggccacccctactgggaagtgaggagcctctctgcccggccaccaccccgtctgggaggtgtactcaacagctcattgagaacaggccatgatgacaatggcggttttgtggaatagaaaggggggaaaagtggggaaaagattgagaaatcggatggttgccgtgtctgtgtagaaagaggtagacatgggagacttttcattttgttctgtactaagaaaaattcttctgccttgggatcctgttaatctgtgaccttacccccaaccctgtgctctctgaaacatgtgctgtgtccactcagggttgaatggattaagggtggtgcaagatgtgctttgttaaacagatgcttgaaggcagcatgctggttaagagtcatcgccactccctaatctcaagtacccagggacacaaacactgcggaaggctgcagggtcctctgcctaggaaaaccagagacctttgttcacttgtttatctgctgaccttccctccactattgtcctgtgaccctgctaaatctccctctgcgagaaacacccaagaatgatcaataaaaaaaagaaaaaaaaaagtgttggaggttaggacttcaacacaggaatttaggagagaacaaaattcagcccataacaccaggtaaatagccaaatgaatgggtgctggtgagaagcaccaagacctaaattcttattcagactcagtcactgctcagcctcctgatcacactccaactcaagttgtcacccataaaatcagaataatgtcaccctgtgcacttacctccctggattattttgaatatcaaatgtccgatgaaagtaagaactgctacatggcagcaaggctttgcttttagataatccatcagtgataagagatggcaaactttttgtatgtttctcataaccttttctctctttataggagtaatatacacccattgtccatccttttcataccatataattgaaattatcctgtaaagagctatataagctgcttctacatatcatagtatattgtatattggtttcctcaggctgcataaattactacagctttggtggcttaaaaaaacagacagttattctcgtacagttcagaagagaagtccaaatcaaggcatcagcagggtttgttccttctgcggaccctgagggaaaattcactgcatacctttctcctaggttctggcagcttccagcaatccttggcatttcttggcttgtagacgcatccctgcaatctctgcttccgtcttcacctggcattctccccggagtcccaagatttcttgtctctgtgtcccaaatttccctctactttattttattttattttattttattttattttattttattttattttattttattgattgattgagatggaatcttgctttgtcacccaggctggagtacagtggcgtggttttggctcactgcaacctccgcctcccagcttcaagtgattctctctcctcagcctcctgaatagctgagactacagatgcatactgccacgtgcagctaatttttgtatttttagtagagacagggtttcaccgtgttagtcaggctggtctccaactcctaacctcgagtgacccacccaccttggcccccaaagtgctggattacaggcgttagccaccatgactggcccccatatttactttttttttttttttttttttttttttttttgagacggagtcttgctctgtcatccaggctggagtgcagtggcatgatctcggctcactgcaagctccgcctccctggttcatgccattctcctgcctcagcctcccgagtagctaggactacaggcacccaccaccacacccagctaatttttttgtatttttagtagagacagggtttcaccatgttagccaggatggtctcaatctcctgactttgtgatccacccgcctcggcctcccaaagtgctgggattacaggcatgagccaccacacccggcccctctatttacttttaaaaggacaccagtcatttgacttagggtcaagtctaaatgcaagatgatctcatctaaagttccttaactcaattacatctgcagagaccccattttccaaataaagtcatattcacaggcaccaggggttagaacatggacataacttttgagggacacagttcaaccccctacacatagtatcatgtacacattctcaagttattaacaattcctaaaacaatcagtgtttcagaatatctcctcatggggctgtggtatgatgtatctgacactgcagttgccagactcctgtgattctgacctcttacatcactgcaaagcaatacctgactttgcatatgccctgtggtattacaagggtgagccaccagcttgagtctttattgcctgggcctttatttcttttccttttttccattagttgttttttatttttatttttatttcttttgagacagagtttcactgtgttgcccaggctggagtgcagtggtgcaatcctggctcactgcaacctccacctcccaggtttaagcgattctcctgcctcagccttgcgagtagctgagattataggcacccaccaccagcctcggctaatggttgtattgttagtagagacggggtttcaccatgttggccaggctggtcttgaactcctgacctcagtgatctgcccacctcggcctcccaaaatgctgggattacaggcgtgagccaccacacctggccagattgttttcattgtttctgtttttcttattaaataaatgttatatatctagcatagggattttagaaaaggagcccagtgatggtcctctccttggttctcaaccctgtgatctttgtgttttaacccctgccctgtcactttaggggtctggaagcgggaaggagacatctgcgagtgctcagatgactatctcgatacactcagggtgtattttctggggtgactgtaggggcatctcggttcatttggtggcaaatccaacttttctattccctaacgaggactttgctgcctttatgatttttctctcactgcctgcttttggaaaaatcttctgacagttatatttaccagtagaactagaagggaatgcttcagtctatcctgtgtttagagtcatggagttggaggaggtttgggtgggaatctgagtgacagccaaggagaaggagatagggccgtcttggggttttctgcagtctcagactctgggtctttgtatgacccttgggaacatgaagcagccagggaatggagccaggaccactttaccccagcaagactcccaagctatatcttcaaaggtctgagggacatggtgcattcacttgtcttctgctacccacagatgaccagctctgtgaaggaggcatcccctggcttgggtaggcagaaagtgttggaaaggaattgaagtaacatttcagtttgaaggttttgtaacagatggtggtggcagctgctctaggagagacaaatgaagttagtgaaatggtccttcattcagtctaccttgtgcatccatccatttagccaactgtgttgatacgtatgatgaaccaggccccatgtcgcacactgggatgataaagagagaacacctggccacagcgtctggaaactccttatctaagaagagggacagactcatgcccacatgatgagttctgttgagtaccaaggtagcagaaaaggggagctttgaactccatttgggagtagccagggaagatggcctttctgcaagattcttgagggaatgatcaggcactcaggcctgggaggggagaagacatcagacgtcaggggatggtcagatgcctgtgcagaaggtaaaatgaaatctgtcagataaaatctacaaaagaatagcggttggagagttgtgggcacaacaaatgcaaagaccatcctggataaagttaagttggcaggaagcaagagaaaaaggggaaagaaagtatcagtatgcagtcgctagaaaggataggacaaaataacccaacttggaaggccccagaaagacaaatgattcaagaagcaccgtctgtgtctgagacgctgtccctgcacagcagtgtcgtccagctggtgagagatgaggatgagagggagtttgaatctgttcgctgctcctatctacctgttgaaaatgtcagagctgtgagtctgcttctgggctggtggccagggtctgtggctcccagcgctgtagtgtcctgccacgtttgtctcagttggtaattgggtagaaaaccatctcctggggcttggtgaccagggtatgagggcactgaacacagtgccagagcttccagaagtgctggggcaggtgcatcccttgctgacttggggccccattgaggctctgcgtctgttcctcatgactcatgaatgtgttcctcatgactgttcctcatgactcatgttcctcatgactcatgactcatgaatgtggctgaattgagggctaaagccctgggtctctcttacagcattgctttggcattcaccaggccagggcaggcgtgaacggtggaatagggagtgtggtaggatgaggtggaaggtggggtgtcctttttcattccccaaaacagctttcttgaactatccaccaggctgcagggggtatcgtttacctggggactgtgtggtgtcccatctctagggaagaaccatgttgcctcctagtggctgtgtctgtcttggacaccggtatctgagaactgagaacaatatttgttccataaatgaggcatgaatattactctttaaagattccctgttgaaggcaggcacagtggctcacacgtgtaatctcaacactttgggaggctgaggcagcaggatcacttggggccaggagtttgagaacagccagggcaacaaagtgagacctcatctctacaaaaaaattaaaaattagccaggcgtggtaccacacgcctgtagtcccagctacccaggaggctgaggtgggaggatcacttgcacccaggagtcccaggctgccgtgtgttataattgtaccagtgcactccagcgtgggtggtagagcgagaccttgtctctttaaaaaaaaataaaaaaggcaagaccatcctggctaacacagtgaaaccccatctctactaaaaatacaaaaaaaattagccgggcgtggtggcgggcgcctgtagtcccagctacttgggaggctgaggcaggagaatggtgtgaacccaggaggcagaggttgccgtgagccaagattgagccactgcactccagcctgggcaacagagcaagactctgtttcaaaaaaataaataaataaaaaattaaaaaggaaagaaagaaagaaagatcccttgttgaagctgaatgcccatgcccaaattctggccttctctctacctcctgcttttgcagtagctttctaatgagccttcctgacctccagtccttgtcactgaaagcccagtcctgcttgtcttgctgtctgtgttcaaacacacaatagcccctcattgccagtagcataaagctgaatctcttactggacatggaaagttctccgaggtctgatctgttcaccacatgcacccataggcacctctgaacaatccttggtttcccacctttcaggcacacttttctgtctgtctagaacgccctcaccagtctagccaggccagaggtttccaattgttcaaattgtaattcacatggtgctgtttcagtgaatcatgctcatatctgggaatgacctgaattctatcccagctctgatgtacccacatggtaacattagagacagtcataatagcagctactgtgtattgagcacttactacacaatacacagtattgtgtagtaagatgggccaggggtgcacatcgcaaaacttcagggggtgccatttacatcgaatacagaagagaggcactgctggccactgtgccaagaccttcatatagataatctcagccctaacagttggactctgttaccgccattttacgaagaaggaaactaaggctacaaatgttaagtttcttgcccagggccacatagctagtaaacaattgggctgggctgtagtcaactcaggtctctttccaaagcccatggtctttccatggcactccgctccctccttaatagatgctaagttccgtgagggcgggatcccactttgaattgtttttagtcttccacctcctccattgagcttgataaatgtatattggtcaaaatccccagtcctgtctagtgccagttacacatcagtgtctgtagtagagaccctggcgctagcatgaattctaccaagcaggctagactttacaatcaatcaatagaataaaaggaaggaaaataaacagttcctcccagcccactgagtactattgtcttgtctcttagtaccactacaaggaaatgctagatcatgagctggggctaccagagagcttcatagacttgaccccaacactttagctggatgacttggagaaaattaccccaaagtgtctgcagtgacttctgtgaccaccaccagcttcccaaaccagcccatccaactcccttttcctgagtgaggtaaaaactggtagaaccaaggaatgctgaatttccaaacgcctcctaagggaactgaaaccgcaaattggccacttggctgagaaatgctctctttccctccaacacacactttccttttcctttagctaaagaatccatagatgagtctcactttgtgatacacgtgctcctgaaagctgtgtggaattgagtcattttctaaattcaccagggaatctttccattttaaagaaaatctctagtcagttataaaaccagatgctatcagagacagaaagaccattagaggtttatctaattcagctttcgtctcattttacagatgagaaaaccagagaggttaagtgacttggccacagtcacacagctcgttagcgataggaattgaccttaagtcaaacagagccttaggtcctctgatgctggtgccagtgctttcccctttccaaacctctttcataatgaaatcacccagcccctacccgtgtccctattcactcccaccaaaaaaatcctccatatagtctgttttacaaattcatccattcttctttcagggagggtttcatctatacttctggctttgtctgcttccaactccctttggccatttgcacagatcagcttttctaacagaaaggtgtgcagaaaaaagttgaaatagcaggtctgttttaggataaatagttgggacgcttgacagcttgcacctggtttcccccagactttactccatgcacctttttccatgctatttttgctctgtaaccttttgctctaatacattgtgcctgtgagtacaagtatatgctgagtcctgtgagtcctcttagcaaatcttcacaattggggtgctcttggggacctccaacaaagagggagaggaagctttcagtcaagggtacaatcaagcagtctcctttcttaattgaggcagggatgattaaggtttgtggatgaatactctgaggtcctgctcacctgggttccactcctgaatctgccatttaccatggatttgtggcaagttattttctcactctgagcctcaggatctccaacaaaggggttagtaacacttaatggcttcgggttcttggaggacgccgagagatgcccagcatagtgggggtgcttgaccaggatgtgctccatgggcataggaactctgagttgtagatgtggtatccccacttctcagaacaggtcctcctgcagcaaatatttgttgaatgtatacttcaggagtgaataaatgccacctaacattgctgcagaaagcacttgagcccaggagggaccggagattattgtcaagcaagatgagtaaattccatataagtttctgtctgagcactggctggctctggttgctgtgggagagaacttttaattgaacacagttgggggtatctctgctttcccagaccttttgctgggtcagttggcacccctccctctcttaggacattgaggcttgtctctggattaccttggttgatctatttctggatctgtctgtaaatttgtcataaaggtagaccctgttaccaagtacatgttcttaattagcaagacacattttgaatggctaagtggaacatccctttttgcaatcccagtgacccatttcccaagtgctctcttttggccttatttttttctgcttcttgaacaaaggagaagggaggaatgcagctatgtgcatatttatttgctctagtggtgggcaaatgtttaaattcctgccattagggggtttctctagcttgctttgcttgttaatgtttttttttaacaggataaatcatgtgcaagtgtcatcgatagactaacaagaggtaggcgggccatgggaaagtagaatttaccacctctccaacagttcaaggatactgttcttctaagtttttaaacattggttggaattgtgccttcagtggggtgtgggggagttggagaggcaccttcatcccagactgaaggccagaagcctcgggttccagttgtgtctcaaccactgagttgtcccagagactttggcataaactgcttgacttcctcggcctctgttcttctttttgtaaagagatgagttcatccagaatgttctctcgcattctggcattcttaaagagtcccaattttgagctcagagaatgccacaccgactgaaagtaagtcacacctttaaacatctgggggacttaaatttgaagaatgtgcccatgatactaccaccactgatgtacccagcctgcgggtgagccaggacaggtaaatggtgacccactgttagtgtccaagagatgactagaccccaggtggcacagcctaggggctcttggaccccacttattccctttgtacccaagtagctttcctaaagcatgttccttagaaccctaaatccacaagcagctccgcctgtggtcacatgaatttgggaggcactttcccaatcttagaaatcacaacagaggtttagagaagtcgtagggaaaagaaattgtttgttgttgtctaacctgtgtttcctgaacttaattgaccaaaaaccccgttattttcccccattccatactgcctgtagcctcccatgcaaacccatttcagaacctgcagctgcagtcagtctggagtcaggtaacttaattaggaatctgtttcatgtcttatcattcagttcctattggttaattttcttggaacttatgtcagagggacatccatgtgcatcctaatgacagcctcatttgagacaaaattttccatcatggacaaaccaaccaccaggtgaccccaggcagtctcccctggcctctaccacaagtccctctcccaggagctcatgctgtctttaggcccagtccatctgtctgtctgcttctctctctcccttcctgtcctctttccttgggcagctcctcctcttccccatttccctgttttccaccctctcacccttgcccttactttgaattctgctgggaagaggatggccttttaccccagacccacaatctttccagttcaggctggttcatttgccatcatttgctttctcattgattaggaattaatcaatggctgacagtctccccagagtggatcacagctgtctaggaaatctgctgacctagaaagattttcagatgctgttaacaacccacagatcacgctgtcaagtattttctttcttcagcagctcttggcatggcgagcatgtgattctgcccctctgctctgtggcctttcagtgacattcattatttatccgggtcctttgaagctctgcctcaaaatgttgccagaaattccaaattattttcttccttcttgtttaaagaatttcatctaaaactttgtttggagagagcccgctgaagtcatagttatattgacttccgcgtctgttccccagctcatctttgctccctgttttctccccacgctggcctccgtgcctggaacaagtcagacttgtgttatttcccagctgtgtgaccttgagcaagtggcttaatgtttctgagccttagtttcttcctctgtaaaataaggataataatacgtacttcacagactagtggtaaggattaaatgagacaatgagagaatgcaaagcacttagcctagttcaagaacatagttatccatcactttaggatacagcaggggcctcttgttcacccctgttattcccaggggtacccgcctggctcatagtaggtgcgcagcaagatttttttcaatggaaactagagtgggatgcgcctatctagaaaatcctctgttggagcctagtcttggtccttaaaagtcctgggcctgccttccccctgcctttaagaagctgagccagcaatagtagcatgtggccacctgcagggctctgtggaggaaagagctttgagctgggaaattatgttcttagatgagtcgtgttctgcctcgccatttctttagtggttctcaatcctagttgcacattagaatcacccagggagcagtttttagagactccatacaagagattgactctgctgattcgaggtagagccttgcgatgtgtcagaagtcctttgctttcgttgagaagaacgtactgagtggaaattgtataacctcatcaacagctaagcacctgaagggataaaaaagaccgccagtagttggcagtcttggttgaggcttcaagattgaatccaaagcagcttgtgattcctttggagtggcacgatccccaactgaagagctgtttgcacatacacattgtcactgcaaactcaaagcccaagtttgttcgtatagccagctctgcccagcaggaccctgggtagggccaggtgccttggcagaacatggatggggcagtacagggccacttggatcaggtccacccatttgccattgttagcatgagctgaaagaagttgggtctcccaaggcagtgctgtctcactgcagtaaacagcagttttcagaagatctacgtccttgaaatatacacagattgggttttgtttgtttacccacacacagccttctcttagaggggagttaaggtaaggaaatgactgtctcaacactcacaccctgatgtggcattatttggcaacaataacttcttcatcatcccctcccctcctcatggcacccacccagctggcagaaaatgacaaagaaggaagatcagcattcatcatcttcagcatgatatggtttcagagatttttagcatttgatttgtaacatttcagaaggcaacataaatcaagctggtaatttgttttgtcatgccaaaaaaaaaggaaaatctgaattcatttgggagaacgtgtgtatgtcagtcactgccttttcggatctggttgaaaagctgcaaatatttttctccacacaaagtacattcaggttttgttgatgatgttgttagtacagatctcctctggggcactgagtaaccctggggagaggatgggaaacagcgtaagggctgtaattttcagcctggaatagaagcagcaattttaggcaatttaaacaattctattaagggcaatcttttggtctcctgctggaaagagaggaccccattcagaatgctcccagtaatgctgtaaggggctgatggggtctccagattgtatacagtttcctgcacccccgaaaccatcatagaggatctctgccccctcatgcctttaaacgggaacattaataatttcctgcttagtgcaggatgtagtccaaaaactcaaaatgagttgtccagataaagggagacctctgggggatgccagaaaaacttggtcttgtcagaagagaaaaacttgagagggagttaattgaagagtttcccacattgcagcttgtgagtggttctgttgcacttttgttgatttttaaaatttctttttatttagtcagtttttaaagtcccaaatgaaccatggggttcttggcccagagaacagatgaacattggttaggccagggagttattttccagcaaactgcccatgagttaaactccactctgtggattgggggtcatgataagggaagggagcccctactattttgcgggtctctgttttgagtgtcttaaaattctagtggagtaggagccattgggaccatcacaggaagatgtagcccctgggtgggaagcagggtgtctgtcttttggagggagcggagtgtctccatttcagttgttgctgagacaggcaaggtctggtggttgaggaaacatctttttctctctgagcctctttttgagcttagattataaggaatctagatctgtcacgggtagatgcttccaggttctgggagcagaaggcactgctacaaggaggcaagttggggactcagtagaaggtaacctgttggttagtagctgttaagcaatttggaccccaacctacaataagaactacttttatatcacaaatatacagataggaagtcattctacattcagcacactgacgcaggtattttttaatacattctattcccttcttttcgttttatgctggccctgacccactatgttagtttctgtacttattatactatttggttgagacctgatgttgaaaaaacattccagtgggatagtctatgaagatagcctcagcacatgagttatgagagctgcctcagctgtgagagttccaggcacgtcactgtccgggggtaattccctttgagtttcattgaattttaaggaaaaagcccccttgctcttcctcaaatgcaccaaagactctctcaccccaggatctttgcacttgctgttctgttcacttagaacacctgtcttccatatacccaagggtccaccttcagctctttatcaggtgccaccctctcaaggagaaccccatccccatccccaccccctgtttaaaattgcaacccatcaccaaccccgctccctcttcgttccacttaccatgttctgggcttttttttttttttttttgccacagcatttattatcttctcccaaacaatataccctataactttttattatatctactctctgtctctgcccactaccatgtaaattctgtgagggcaggaatttctgttctgtatatcatcatatcccatcagctggagcagtgcctgtggtgtgacagatgctcactgaagactttgtggaatgaataaatgaatgaattaatgctgttaaaatgatagcctcttcttactacaactgtcttttattttttttaattgatacgtaataattgtacatatttacagggtacaatgtgttgtaatccatgtatacgttgtgtaatgatcaaatcagggtaattggcacatccatcaccttatatgtgtgtcatttcttttggtgactacattcagaaaggtctagctattttgaaatatacaatacattattattaactatagctgccctactgtgcaagagaacaccagtttttctaattgtaattttgtacgtgttggctgctttcttaaattgtggaaattaaaggaagggctgaactgttactcagatttgaatagaaatgaggaagaagaagaacagtgagataaggagatagtgacagtgatacatgttgacaattccattgaaaaagaacttggccgggtgtggtcgttcatggctgtaatcccagcacttaggacacgaaggccgaagcatcgcttgagcccaggaatttgagaccagcctgggcaacatagtgagacccccatctatataaaaattttaaaaaacttgctgggtatggtggtgtttgcctgtagtcccagctactggagaagccgaggtgggaggatcacctgagctcgggaggttgattctgcggtgagccgtgagcacgccactggactccagcctgagcaacagagtcagaccctgtctctaaaaagaaaaaggagccagatgcggtggctcactgctgtaatcccaggggaagccaaggcagaaggatcacttgaggccaggagttcaagaccagcctggtcaacatagtaaaacaccgtctttacagaaactaaaaaaaaaaaaaaaaaaaaaaaagccagatgtggtgacatgctcctgtagtcccagctacatgggaagctgaggtgggaggattgcttgagcttgggaggttgaggctgcagtaagcccagatcatgccactgcactccagcctggcaacagagcgaggccctcaaaaaaaaaggagaactcagggaacaagaatcaaggtggcaaaggcctatgacctttgcccacagaataaccacccctaccctggagggccaggacggttccttcctctccttccatcccaagcctgagtcttatgttccctgcccagtagtgagtcctccggcaactcatcagcaacacagagccgcagggcttttgttgggacccccttgaaaacactcagtcccacgttgctgcacattgctagtggttgataagaccgttgcaggaaaatttataaatccgtggccttactggctgtgagcgaggcagataagccacagtctgacagaaagaaaagcatctcccttccctgttcttgcctgagatgcaaagaataaacctgaatctgtgtggtgaatgaacgtcctggtgaagtgaacgtgataaaattccagcttgctgttttgtgggacgtattgcaggcaccgcatctttgttctcagtcccctctgccctttgtgtgggccagcctcgagggacgtggcccagtgaatcctgggggaaaatcacgctcacagaaagccagcgtgatttcccagccagaggagataaggcccgtgggagtgaatggcagcttagcgacccctgttgcaccaaatcctccttgaaatatttaattataagatacatgaatgcttatcccagcagttattttttcctcttaacccatatttagccttgcagcaaaaaataaaatatggttcctgggagtttatctttcttttaatgaggctctcaggggtcagttttttcccttaaaaaatttttggcccatcgttcaacccaggaactctgcttgtcagagaggatctttgaataaaataatgctgtctggttcttttcataggtatcgtttaccctttcatattggttttcagttttaaaaagtattttcacatagaagaaatcgggactgaaaacgcgttagtgaccagctcaaagtcacacaatgacttagtgagaactcgaaatggaaacaggatcttttttttggcgtggggagggacggagtttcgctcttgttgcccaggctggagtgcaatggcgcaatctgggctcactgcaacctccgcctcccaggttcaagtgattctcctgcctcaccctcccgagtagttgggattacaggcacctgcaaccacacccagctaatttctgtattttcagtagaaatagggtttcaccatgttggccaggctggtcttgaacgcctgacctcaggtgatctgcccacctcagcctcccaaagtgctgggattacaggcgtgagccaccgcgcctggccagaagcaggatcttgaagctctcagaatgcccgtctctccttctgtgcacagtgagggcttcccattctttctgatttccctttcctgtagcagagaggggaagatactccacattagtcaagagctttagggtaccaggcactgtgtgtaaagtacatttcttatattacccctttgattcctcccaggaatcctatggcatctataatactatccccattttctaaatgaggaaatggaacttcagagtgattttgttccaagtagaaatcaggctctggcaactgcttcctgctagcagggtgagatacaaacttttacaaatagcagacaggccatcatataaatatatgatgtatttataaatacatacctgtagatatatttctaaatacatatctgtagatgtgtttataaatgtgggggaaacagataaaaatccctacccttgtggagtctacattctgttgattcattttgggatggatggatggatggatggatggatggagtacaacaatcttcagaggccaactccacttcagtcccggcaaattcctcttacagaagagcggtaagatacattggtagacatatacaacctgggcttcagaccagggaagttttattttgccactaaatttagccactgtatcaacacatctcccagcttacaagatgactgagaacaagtgtaagttcttgaggacacaagcccttgccttagtcagctttgtgtgccctgctgtacttaatgcttcatgggtgttcattaaatgtttaaatgaatgagatgcataattcagttacgatgaggctctctgagaatgagttaacatctatcgagagttgtgcagtccgcagacttagaaatatccaaaaataatcacccctagagagatctctgcaaatcagtaatgaaagaactgaagtaaaactataaatcattccgttaacggttttatacatttacaagtaagtaattttggaagcaaaattggtgtataagctgtatttagcctcgatgtgctaagcaactttgaaccaaatataaattcctggcgtggtatttttaagccacggtgggggcagggtgctggggaaaaagttgagttggaggagcatcaaagctatttttgtaagtttcatctacatttttagaaagatgcatttttgaagaattgggatatcagtcacttctccctggcaggattcctcatcaagggagaaatgacagcatgtccgatcttccttgagtctctaaagatcgcattattaagatggtttctgtcactgtgcaccatgtctgagaacatgtcttggcacaccaccctgtccttcgtctcctgatttatagcttgcaatagacttgttgagtgtgaagctagaacccagacagaatgttaatgcagggaaatgacatgtgaatcagtggtgccctgggctttgagtgcacatgactgaggggaggcccagtcagctgtggctgtgctcctcacattagctttgatttgctagacattgcatgaagaatgaagcagagccttagccgtgagcttctcagactggagctaagccgtggtccctaagtctatagcttcccactggagactgacttaattagccaggatcctgagcttggctaatggtgggcccagtgaatgcttgatttgcaatggaaatgcccaatttggtatggagtctccatttttaaaatgcattggctaactttgcagcttcccccatccccttctcatgacagtctccctttctggaatatttcaaatgcaaagggggaaacagggttgtcgttatatctggatcctatccacaagggctcagcagctgtgatgttcagcaggccaaatacagacccaagagaccaaacagcttcttccttccccaagcagttaaaacaaagatctgctcactgccttgcctgtgtgtcttcatgggtgtttgatatcagggtaaactctaggggctaaaagtgggagcagaaaaagcaatgcaaacgcattaggcgagaagccagggcggatcagcaaaaggtctggaattatggaaggctgaagataagcagttttggttgatttccaacacaggcagttgcctgctttaatgtctggataagaacttgcctgtaattggtagatggattgcttggctataaatggagcctgaaaagagtctattcccttccagcaattaaacatccccctgactgctgccactttctccactctgattattcagcagacccattcttcttaatacacagcaccgaggtgtggcttagcccagcctggtttgaattagcttatgggatccacattaatgaagcctagccttacttccctgcatatgatgtgtgactgggtatagtcaagtgcccagtgtaggtaaatagatttcggagaatggtgatgtaagatacctaccaaccatatgtggaaatccttttcaggatggtttccctctgcaagactgtaaaggtaggaaatgcactgcctttcccaccccttcactcctgcacccatttgataacccacttgagtgtttagaacagtcttccaaagagggatgtgtgcaaggtgattgtttagggaaggaagggagggagggagggagggaaaagggagagagaaagggaaaaggggaggggaagaagggcaggaagaaagaaaagctttagatttgatatatagattgacgggatcatgtatataatggaaatatacatatattgggggaatagtgtctcaaatggtggaagttcactggtttagagcactgaatgagccacctcaattttgctcccgttttcatctttgtccctagtgctgagtggcttcagttttcactgctttgatctatgtcctgcctgactggattaagaaaatagagacctagagcttccagtgggaagagaggaaatcggtgacagaactgaattaagacatctttctagaaggagccattttccagcctcttaccactgccctgggtgatcctctaggtcacacaggagctgatatcatggttgagccctgggaatctcagccacgctctgtccctgtgcatctcatacaagcttccatggtgatgaaaattgttaagatgtcttatgtgaagcacatgggcgttgggtttgctcatcacaagctgcctgctgctgatgctgtttcacctatttaaaatacccaagtgttgctttatttaaaattgaacaagagtcagccacttagaacatttatcaataaactcatcactcaaatggaattgtgcccctgcccctgcacttgcatatggtcttagattgctgctcatttccaggcacagatggcttgcttcaaaattttttgcttgaacagggtaaaaaagcgagagttggtagcttttaagtgtacaaacttgccaagaaaggaaaatgctgtgagtggggatgattgctggcaagcagcagggtccgatataatccatgtctgtccatccgtgtgtctgttcttcagccctgtgtggcagatccccttccagtgagtgagctttagcaaatggagtgtctatgacagctatttgaatcatcctagaatctactggcttaaagctgacagctctgactcttcctttaacttcttaagtgcagtgttttggacagagatagaagctttgcgagcaggcagcccgccagattcttctatgtcccagatctggatgttagattagaaaatttgatatttacaaatgtgcttcaccttgaattagccatgacccagttgctattgtttgttgaaagagatatcttttagaattttacttatacaactgacttgcttttcaaaagcacaataaaatcttatgttcccattataaaagtacatatactcattacaggatgtttggaaaatatagaacagggaaaattttacccacatttcctgcttccataaataatcactattagcagttggcgtatttcctcccatatccttttccatgcctaggcaatggaggctttttgttcttgcaaccgtgatactttttattcagttttacatcctactttttttcccacttatattaataaatattttcccatgttgttataaactcttagtaagcattcttaatggttgtatgatattctattaaatgggtgcatcttattttacttagccacacatctattgatgaacatttagattttgtcaatacattgttgtagacgaagttgtgatggctttaaacctttttttttttgctttcgtcttttgaattacttccttaggatagattaccgtaagatttatatgaggtatgaacacctttagggcccattacacttatattactaacttgttatccaaatggatatctgtttacacccccacaagcaatttgatagaacctttttttcatcacgtaattgccaacataggatattatcattttaaaaaatcattcttgcactgctaggcaagaaatggtatctaattgcagctcccttctaagtgttgattgagcctttatttaggaaggtcctgctgtgttttgcatagttcattggaaattctaggaaagtgctcttgaaaaaggaaattatttattttcattctactttttcaaacttctcacctccccctcccaccccccagttttaagtcatcttacatgaagaaatataagaccaaattacagaagcagggaattaatgatccaaagattctagttaacaagatgatcacccaggtttcaaaaaataagtgatctcatttttatggcttaaatattttagtaaccgttgagtgcctactgtttatatttcttttctaggctgactggcttgcttcctccctccctccctccctccctccctccctcccttccttccttccttccttccttcctctattccatcctctcctctcctccctcctctcccatcctagacagcttaggtgaagggctgacagagggaaattgactggctaatctatgtgcagtagcccctggttcctgctctttccgctgaacatgatttatagttgtttggcagaaggtcaaaatctgattccatagagtgggaatgcagggggaaatatttgatttctttgacacagttcattaaaaattcatacatatggatctggaaatgaaacattgctccatgtcaacatgagttacagtgggagcctagagcaagacatgagtattcaagtgagacactgtcacaaggtaatcacatcggcatggcagtgcctctcagtgagacatggaagggggaaaggtgacctggactctggagggtggaaatgaaatttttctcttttgcctaaaggctttccttgtaaatagaagccagtttgttagaaaacctctgttacaaagagcccatttcattcatgtattcttttgtccatttgtttgacaaatatttatttattttccactattggtaaggtgtatattgattaataagagagatgacttatttcaaatttccctgttatttctactttgtttcttaattcttcctctttgaccctttactttagagctatctgacttttacaatgtctagacttcaagccttttattataaatactgtaaatggttggaaacatgatcttctagcccagtacttctcaaattgtaatgtacacacaaatcatctggggatctgttaaaatgaagattctgattcagtaggtccaggatggggccagagagaatgcatgtctgtcaaattcccaggagatgccgctgctgctgatccaagcaccatttgaatagcgaggctctagtctaccatatctgtactgggttgaataatgttctccataaattcataaccacccagcacctgtgtatgtgaccttatttggatatagtttttgcagatgtaatcaagttaagatggttttatggtcaacattcttcaggaaaatggaattaatagaataggatgtagatagaatgatattaatttattttaaggaattggttcatgcagttgttcggggctagctagtccaaaatctgcagggcaggtcagcaagctggagaccaagagaagagtagatgttgcagtcttgagtcagaagggagtctggaagcagaattccttcttttcccgggaacctcagtcttttctctgaaagccttcaactgattggatgaggcccgcccacactatttgcttgaactcagagatgttaatctcatctgaagaaatatcttcacagctgcatctggactggtggtggactaaaagctgattaccatagcctagctaagttgacacataaaattaaccatcacgatgaggtcatactggattagggtgggccctaaatccaatatgtctcatgtccctgtaagaagaaggaattttggacacagactcacaggaccacgtgaagacagaaacagagattgagagctaaacacaattgatccaatggaggtaaagagtagaatcattaccagatgcatctacaagccaaggagcacccaagatagccagaaaccaccagcagcgaggaagagacaaggaaggactctttcctagggccttcagagggagcacgccctgctgacagcttgattgcagactttgggcctccagaatacatttctattgttttcatgccacgcagttcatggcactttgttacagcagccctgggaagctagcacggtatctaagacataggcctacaacagacctaagaacatcatcacaaagccagaatgcttgacttttctggtaatttgccaccttgacacatggatgcagtgtctggaaggtgcaccaactaaaatgctttgtcattctcatagaagagaagttcagagtcactgtgggtgggaatgaattggtcaggaatcccctcctctttcttagactcccgagttggtctgaaaacgctcatcgatattctcctctactttctcttctggccctgccttcaggttgcagggcagcccggtgacaaatgaggaggagctgaatttgctttttatttgaacaaactatactaattgaaatggaccccactgggattgctgtctgccataagtaatgtatatttcattaacattttctttaaaaaccaacaagatcataaagctaagattgctttagcctaaatgctgtccagatttaatatgcatgatataacctcctggcatagcactaagcttgagcatgcaatttttggtgcctccctgatgcttgtttttaacaggaggagaatcaatacggggtgagggttagaccaacaacgtgaactgtcaagaaccagagaaataattaaagttataatattaacaaaacaacatggttgtagaggggatggataaatgattttattccgtttttttctttcttcttttttttttttttttttttttactgcctcaggcatatttgttggcattttcagaaggagatagaatcaggagttatttttctgctaggaaatgtttaagtaaatcccagttgtgatcaatagggtagcctccacaaagcaagcaaagcagtaaatgtcactcatttcactttttagcaacagttgtgtgtgtgttagagccgaagtctgaaaccagtgacttcaacattagccagggagtatcgaccaaaatcggtggtgaggagataaaattgccctggaaaagttgggttccccttaacaatggtagcatggagaaatcagacttccagatgttgtgatttctcagctctctaattcatcaaattaagatgactttcaggactgcctggagatggacttcagacagaacacagcccacatcatgctttgagctgaacacgtttaaaagagtttcacattgaggttgaagcatggctgtgcagaatgacatatgaggaatgactgtattcccattataggagtcaccctgcttttttactctcccagaagagttgtcttatttctgatttgggtgagtgcagactacagttgtggagcattagctggacccctgctcctcctggggcaaaacaaatccttcttattgatctgtgagcttttttattgatacataatgattgtagtgtttatggggtacatgtgatattttgacaaatgcatacaatgcataatgatcaaaccagggtaattgggatatccaccacctcaaacatttatcatttatttctgctgggaacatgccaaatcatctcttctagctgttttgaaatatatgattattgttaactgtagtcaccctactgcgctgttgaatactaggacttattccttctgtttaactttacgtttgtacctattaaccaaactgtctttatcccagcctcacccctgccacccttcccagcttctggtaaccatcattctactctttccctctgtgagatcaattttgtttagctcccacatgtaagtgagaacatgtaatatttgtgtttctgtgcctggcttatttcacttaacctaatgtcttccagttctagttcctgtcatttgttactgcaaatgacagaatttcattctttctgtggctaaatagtattccattatgtatacataccacattttctttatctattcatccattgatgggcacttatgttgatttcgtatcttggctaatagagctgcataagcatgggagtgcaggcatcttttcggtatcctgatttcctttcctttgaatatatcctcagcagtgagattgttggatcatgggggtaaatctatttttaggtttttgtattttttaaattttttaattcaataggtttttggggaacaggtgctgtttggttccatggataagttctttagcggtaatttctgaaattctggtacacctatcacccgagcaatgtacactgtacccaatgtgcagtcttttatccctcaccctcctcccacccttccctctctggatccccagagtgcattatatcattctcacgcctttgcctcctcatagcttagctcccacttgtaagtgagaacatatgatgtttggttttccatccctgagttacttcacttaaaataatggtattgaactccatccaggttgttgcatatgccattattttgttcctttttatggctgaacaatattccatggtgtgtatgtgtgtgtatatatatatatacatatatatacacatatatgtacatatatacacacatatatatacatatatacgtatatatgtatatatgtatatatgtatgtatatacgtatatatacatatatatacacacacacatatatatctgacattttctttatccacttgttgatttatgggcatttgggctggttccatattttttcaattgcaaattgtgctgctataaacatgtatgtgcaagtgtattttttatataatgacttcttttcctctgggtagatacccagtaatgaaattgctggatcaaatgatagatctacttttagttctttaaggaatctccatattgttttccatagtggttgtactagtttacattcctaccagcgatataaaagtgttccctgttcaccacattcatgccaacatttattatcttttgatgttttaatgatggccattcttgcaagagtaaggtggaatcacattgtggttttgatctgcagctccctgatcattagtgatgttgagcaatttgtcatacgtttgttggccatttgtatatcttcttttttttttttttttgagacggagtctccctctgttgccaggttggagtgcaggggcgcgatcttggctcactgaaacctccgcctcctgagttgaagcgattctcctgcgtcagcctcccgagtaggtgggacaacaggcacatgccaccatgcccagctaatttttgtatttttagtagagacagggtttcaccatgttggccaggatggtatcgatctcttgacttcgtgatccacctgtcttggcctcccaaagtgctgggattataggcgtgacgtttatcttcttttgggaattgtctatttgtgtccttagcccactatttgatgagattatttgtttttttcttgctgaattgtttgagtcccttgtagattctcgatattagtcctttgttgaatgcatagtttgcaaagattttctcccattctgttgggttgtgtgtttactctgctgattgtttcttttgctatgcagaagctttttcatttaattaagtcccactgtttatctgtttttgttgcatttgcttttgggttcttggtcatgaagtctttgcctaagcccatgtctggaagggtttttctgatgttatcttctagactttttatggtttcaggtcttagatttaagtctttgatccatcttgagtttatttttgtataaggtgagagatgaggatccagtttcattcttttacatgaggcttgtccatttatcccaacaccatttgttgaatagaatgtgctttccccactttatgttgttgtttgctttccccactttatgttgttgtttgctttgtcaaaggtcagttgactgcaagtatttggcttcatttctgggttccctattctgttccattggtctatgtgcctgtttttctaccagtaccatgctgttttggtgactatagccttatagtataatttgaagttggataatgtgatgcctccaggtttgttctttttgcttggtctttctttggctatgagagctcttttttggttcctcatgaaatttaggattgttttttctagttctttgaagaattatgataatatattgatgggaattagattgaatttggagattgcttttgcaatatagtcatttttacaatattctacccatccacaagcatagggtgtgtttccatttgtttgtgtaatctgtgatttctttcagcagtgttttgtagttttccttgtagaggtctttcatgttcttggttaggtatattcctaaggtgtttttttgtttgtttgttttgcagctattgcaaaaggagttgagttcttgatttgattctcagcttggtcgctgttggtgtatagcagtacttctgatttgtgcacattgattttgtatcctgaaactttactgaatttatttgtcagatctaggagactctagaagatccagagtctttagggttttttaggtatatgatcatatcataagtgaagagcaacagtttgacctcctctttgacaatttggatgccctttatttcgttctcttgtttgattgctctggctaggacttccagaactatgttgaatagaagtggcgggcatccttgtcttgttccagttctcggggggactgctttcaactattccccatttagtataatgttggctgtgggtttgtcataaatggcttttattacattaaggtatgtcccttctatgccgattttgctgagggttttaataaaaaagggatactggatttttgtcaaatgctttttctgcatctattgagatgatcatatgatttttgtttttgattttgtttatgtgatgtatcacatttcttgacttgcgtatattaaaccagccctgcatccctggtatgaaactcacttgatcatggttggattatctttttgatatgctgttggattcagttagctatcattttgttgaggatttttgcatctatgttcatcagggatattggtctgtaattttattttttggttatgtcctttcctggttttggtgttagggtgatactggcttcatagaaagatttagggagaattctctatttctctatcatttgtaatagtttcagtgggattggtactaattcttccttgaatgtctgatagaattcaactgtgaatctgtccgtgcctggacttttttggttggcaattttttaattatcatttcaattgggctgcttgttattagtctgtttagagttcctttttcttcctggtttaatctaggagggttgtatatttccaaaaatttatccatctcctctagcttttctactttgtgtgtgtaagggtattcataatagccttgaatggtcttttgtatttctgtggtatcacctataatatctcccatttcattcttttttattattattatgctttaagttctagggtacatgtgcacaatgtgcaggtttgttacatatgtatacatgtgccatgttggtgtgctgcacccattaactcgtcatttacattaggtatatctcctaatgctatccctcccccctccccccaccccacaacaggcccaggtgtgtgatattccccttcctgtgtccaagtattatcattgttcaattcccacctatgagtgagaacatgcagtatttggttttttgtccctgcgatagtttgctgagaatgatggtttccagcttcatccatgtccctacaaaggacatgaactcatccttttttatggctgcatagtattccatggtgtatatatgccacattttcttaatccagtctatcattgatggacatttgggttggttccaagtctttgctattgtgaataatgccacaataaacatacatttgcatgtgtctttatagcagcatgatttataatcctttgggtatatacccagtaatgggatggctgggtcaaatggtatttctggttctagatctagatctttgagaatcaatatcgtgaaaatggccatactgcccaaggtaatttatagatttaatgccatccccatcaagctaccaatgactttcttcacagaattaaagttcatatggaactaaaaaagaacctgcattgccaagacaatcctaagccaaaagagcaaagctggaggcatcatgctgcctgacttcaaactacactacaaggctacagtaaccaaaacagcatgatactggtaccaaaacagagatacagaccaatggaacagaacagagccctcagaaataatactacacatctgcaaccatctgatctttgacaaacctgacaaaaacaagcaatggggaaaggattccctatttaataaatggtgctgggaaaactgggtagccatatggagaaagctgaaactggatcccttccttacaccttacacaaaaattaattcaagatggattaaagacttaaatgttagacctaaaaccataaaaaccccagaagaaaacctagacaatgccattcaggccataggcatgggcaaggactttatgtctaaaacaccaaaagcaatggcaacaaaagccaaaattgacaagtgggatctaattaaactaaagagcttctgcacagcaaaagaaactaccatcagagtgaacaagcaacctacagaatgggagaaaatttttgcaatctactcatctgtcaaagggctaatatccagaagctacaaagaactcagacaaatttacaagaaaaaaacaaacaaccccatcaaaaagtgggcaaagtatataaacagacacttctcaaaagaagacattcatgcagccaacagacacatgaaaaaatgcttgtcatcactggccatcagagaaatgcaaatcaaaaccacaatgagataccatctcacaccagttagaatggcgatcattaggccaggcgcagtggctcacgcctgaaatcccagtactttgggaggctgaggcaggcggatcacgaggtcaggagatcgagaccatcctggctaacatgatgaaaccctgtctctactaaaaatacaaaaaaattagctgggcgtggtggcaggtgcctgtagtcccagctactcaggaggctgagacaggagaatggcatgaacccaggaggcagagcttgcagtgagctgagatcgtgctactccactccagcctggggacagagcgagactccgtctcaaaaaaaaagaaaagaaaagaaaaaaagaatggcgatcattaaaaagtcaggaaacaacaggtgctggagaggatgtggagaaatacgaacatttttacgctgttgatgggactgtaaactggttcaaccattgtggaagacagtgtggcaattcctcaaggatctagaactagaaatatctcccatttcattcttaattgaacctatttggagctctcttcttttttttggttaacctcactaatggtctattgattttgtttatcttttcaaagaaccaccttttgtctcatttatcttctgtaattttttttgtttcaatttcatttagttctgctctgatctttgttctttcatttcttctgctgggcttgggtttgctttgtttttgtttctctagttcctttaggtgtgaccttagattgtctatttgtgctctttcagacttttcaatgtaggtatttaatgctatgaactttcctcttagcactgctttcgttgtatcccagagtttttggtaggttgtatcactattattgttcagttcaaggaattttaatttccatcttgatttcattgttgacccagagatcattcaggagcagattatttaatttctatgtatttgcatggttttaagggttccttttggagtcaatttccaattttattctgctttggtctgagagaatccttgatataatttcagttttcagaaatttgttgagacttgttttgtggcctattatatggtctgtcttagagaatgttccatgcactgatgaatagaatgtatatctgcagttgttgggtagaatgttctgtacatatctgttaagtttagttgctctagggtatagtttaagtccattgttactttgctgactttctgtcttgacttgtctagtgctatcagtggagtattgaagtcccccactattattgtgttgctgtctatctcatttcttaggtctagaggtaattgttttacaaacctaggagctccattgttagtacatatatatttagaattgtgatattttcctgttggactaatccttttaccattatataatgtccctctttgtcttttttaactattgttgctttaaagtctgttttgtctatagctactcctgctcgcttttgttgtccatttgcatagactgtctttttccacccctttaccttaagtttatgtgagtccttatgtgttaggtgagtctcttgaagacagcagatacttgtctgctgttggtgaattcttatccattctgatattctttctcttttaagtggagtacttaggccatttactttcaatgttagtattgagatgtgaggtcctattctgttcctcgtgctagttgttgcctgaataccttgtggggttctttttttcattgtgttactgttttataggccctgtgggatttatgctttttggaagttctattttggtgtatttcaaggtttttttttttcaaaatttagaactccttttagcagttgttgtaagtgctggcttggtagtggtgaattgtctcagcatttctttgtctaaaaaagactatctttccttcatttatggagcttagtttcactgggtacaggattcttggctgataattgttttgtttaatcaggctaaagctaggaccactcccttctagcttgcagggtttctgctgagaaatccgccgttaatctgataggttttcctttataggttacctgatgcttttgcctcacagctgttaagattatttccttcatcttgacttcagataacctgttgactatgtgtctaggtgattatctttttgtgatgaatttcccaggtgttctttgagcttcttctctttcaatgtctaggtctctagcaaggccagggaagttttcctcagttattccctcaaatacgttttccaaaattctggatttctcttcttactcaggaataccaattactcttaggtttggtggtttaacataatcccaaacttcttgggggctttgttcaattttttttttcttttttctttgtctttgtcagattgggttaatttgaaagccttgtcttcgagctctgaagttctttcctctacttgtttgattctattgttgaaaatttccagtttattttgcatttctctgagtgtgtcttttatttccagaagttgtaattgtttttcattgatgatatttacttctaaggagacttttttcattcatatcctatattactttttaaatttctttaaattggttttcacctttctctggtgcctccatgagtagctaaacaattgagcttcttagatctttttctggcagtttagtgatttcttcttgatttggatccattgctggtgagctagtgtgatcttttgtggatgataaagaaccttgctttgtcatattaccagaattgtttttctggttccttctcatttgggtagactctgtcagaggaaggattgggggttcaagggctgctgttcagattcttttgtcccacagggtggtcccttgatgtggtgctctccctcttcccctagggatggggcttcctgagagccagactgcatgattgttattgctcttctgggtctagccacccagtggagctactggactccaggctggtgctagggagtgcctgcagagagtcaaagagtcctgtaatgtgatccatcttcacgtctctcagccgtggataccagcacctgctcaggtggaggtagcaggggagtgaagtggactctgtccttggttgtaattttgtatagtccgctggttttcacaaatgctgcttgtgctcccgattggttggactccagcaaggaggtgatgctttcaagagagcatcagctgatacaacctaaggtcgcctggataagtatttgggtttctcaggccataggcagtgccatagagctcctaagagattatgtcttttgtctgaattcagagtttttgttttttggctgtctcatggagtttgcagtggcaagccacttccttcaaagattctgtgaaatcttgtggctttcctgctgtgttcctgtggtggtttttggagctaaagttcacgatgtgagtttctacatgctgttctgtccttctgagtgggagctgcaagttagtcctgcctcctcaccaccatttttccctattttcagttttttgatgctaccacagttttataccactttgttctcaatccctcagtctcatcctgcagaagcccttgcctccaactctatggagaagaattaaggcctcccagtgagagtttcttcaacctcctctccaccccaggatttcagtttcccactgttcccctccccgccgccagcccaactgctgagggttctctcctggaacctgccacacttctttgacctccatggttcatctgcccagtggtcttcccacctcctcattccgtcgtacgccaaatccatcctacactcagtgtcatatttgtttttctcagttgttacctctcccactcaaaccccttccaaatgccccttttgagtaagctcctcaccatggcattcagagccgtgcatttgagtccagtggacatataccccacctctatgccccatcaaaactggattgttgatcattacccaaaaagatcttgcagtttctctccttccactgaccagcgctaattcccttcacatgaaatattctgtctccatctccacttgctaaagttgtttccatccttcaagactcaaataccacctacctgatgaatcatgagctgattttcacttctgtgccagagaccctcccatccctcctgcctttgaacatccatagcatgtaatttatactgcttttccatcacttatggtggagaacttgtattcctgacacttgcctaccttgatttgtccaccaatttgattgtaagtgtcttgaggtcatagaagtaaaagcatgccttgttacccagagtatgggctgtctgcctttgctatcagaagccgtccttaattgtgaactgcattgaattctcaacagagcaggacctgtctctgtaatttaatcttttccctgacttgaacaacaatgaagcagggagacagaatgctctggctgacatgggaatcccagggtgttcactaagtacacattcttgttctgcatccctggagattccgaatgaaaaggtagagcccagataggccaggtatggtggctcatgcctgtaatcccagcactttgagaggctgaggcggatggatcacttgaggtcaggagttagagaccagcctggctaacatggtgaaaccccatctctactaaaaatacaaaaattagctgggagtggtagcaggtgcctgtaattccagctacttgagaggctgaggtaggagaatcacttgaacccaggaggtggtggttgcagtgagccaagattgtgccactgcactccagcctgggtaacagagtgagactctgtctcagaaaaaaaaggttagagcccagaaacctgtattttttacaagcgtctcagctcagaagttcattgctactaaaacaccttgtgagaaccactggggcagtggaccaaataaagttgagtttgaatccagttcttcagttccctagttgtgcagacctaagcagcctcctcatctgtaaaatgggataatacttgcctttttaggccactgcagggagtgaataaaacaacggatgtagctgagctcggtggctcatgcctataattccagcactttgggaggctgaggcaggaggatggcttgaacccaggagtttgatgccagcctgggcaacacagggagacccccatctgtacaaaaaaataaaaaattagccggacatggtagcctgtgcttgcctgtggtcctagctacttgggaggctgaggtcggaggcttgcttgaacccagatcgaggccatagtaagccgtgatcacaccaccgcactctagcctagacaacagagcaaaaccctgtctcaaaaaaataaataatcaaaacaaacaaaaaacaacatatgtaaaatggccagcccaacgcacagatcagggtagatgctgtgtcagttttcttcccaaagtgccacattcagttctgcatcctggttccagggggttcctacctgcctcggtacactatcatttttcctcatcctcagcattagttgaaggtctcttccatcctaagtcagcagctcttcttcagctgggatttgtctgcctcttcactctcttctgcttgtggcccagaggacctgagttgcagaggtcacaactgctgtgctggctttcttagaacacctttctgttgggccatttactcaacatacacttgttgagtgtctgccctgtggcagattctgtcttagagactggatgtacagcagtgaatacaatgagcccaaatccctgtcttcatggacgtatagtctagaggcactgtacatgtagaagtaagtaggaaggtgctcaaggaggcctgcgaggagagtggcgggagctggggacagctgaagacaggaggcgtgtgccagacagtgaagccttatgaggcattgaagggacttttgcctctactctgggtgacacggagcgcatggacagttttgagtggaggagtaccctcatgtggctcatattttgacaggatcatctggctgctgtgttgagaatagactgcagagggtagtggtggacatgaggaagcagatgggagactctggctgtaataaggggtaggtggaggttgggggtggggtgcggatggtggccaaggccagcgtgtgccaattggtgtggtaagaacggtcagtgcgggccatgcttggaaagtagagaccattggaattgcttgtggatttgatgtagagtgtgagagaatcgctaaggatggcaccaaggtttttggcctaaagaaatggaaggacggagctaccagtaacagagatggggcaggggcacacattgcagaaagaacacatcaggaactcagctagggatatattacctcctgaaattcagtgtggccttgggtagctgatctcgggcagagattggtgactcttgtccccgtgtgtggctcaatgttaactttttaacgatcagatgctgacctctcccaataaaatgtattaactgctggcaccacttcaaaactctggctagtctttaaaataactagttagctttcattacaaaagtaatacctacacatggtaaaaaaaaaaaaaaattctaagaattacaggactaaggtgaaaaaataagccttcctcactacccctgcttattgttctctgtctttttgcagctatttttccacaaattactgtgtcctgagccctgagctaattaagtgctggataagcatcacctcccagtaatcctgttatcagcctttgaaatgtaggtagctttattatccacattttgcagatgaggaaacagagtcaggtgaagtgtcttttccaaggccaagctcctgagggcaggggctcaagcttaggccttcagactccaaagtccagaccgtccctgggaacaagcaccctaggttttcacatggagcctccgaaacgcctctggcatctcctgctgtggggttggatatgagctgtcttatatagaccctacctaaattaaattaaaatcgactaattaaatgtggcctctttgaatacactgccgtatttctaattacagctttccttctctcctgagaaggcagcccaacattgtttctgaaaaggtcctcaattactaatggttggataacattttgaaaatgtaagtgtcattaaattgttagttagaaggccctgagtggggatgagaggatggaagtcagttgtcaaccgtctcctctctctctctgtttctgtctctgtctctcacactttctctctctcactgtttctctctctgttcaatacacatatgcacatccttatctcacaattgacccaaagcatcagaaataaaaagtcagactgagtgaccttagctgctaggaagcatcttattgtgccttccctccctctctgactttggccttgacactgatctgagcctgcagataacagaaaggaggagcttatctagacaggagtggtggaagtagccagtaataaatcattgaagtgaggagaatgaaggtaaagaaattgatcagctttaaataggaggtgactccgcattcctcttgcttggaaatgatccccaggatggaattgtgtccagggtgtgaggttgtttgtgaatcagtcctttccagatagaatatatgaggcttgaaactacatagtgcttatcaccaagaggtgtataggtttgtcagagcaagaagaccactctcccctccacctgcccccgcaaaaaaaaagaaaggtagtatagagacttagaaagtagagaaatataggtagaagtacagtacctttgagtgaccttcagaattcggtcctcttggctcaaaattttggcatcatttcaacaaactattttttttctctcctcatttgatttccccttcaagaagacagggagtgagtgggctccaatcttggcaacgttggctgcttattagagcatttgcaggcctgggagatttgctcctcctcttggtatctgaaattccacaagccccttgttcacttcccctggagtagggattgtggaatgttgccactcaccttcagttccctgttgaagctcttgcagacccctaatagtgcatgctaccgttctgcagagaagaccatgatgacaaaccacagacatcccccttcatctattgtcttctgtgtctttgggaaggcattcctggaatgactgggggctgtgtgtctcagtttaataatgcaagcttttggtttttgttaaacacatgcagagcctgatattaagcattaaaccaaggagctaggctaagacagttgtgtcaagaagttgttgtctttgaagaagcacaaggaatttaaagggatgaggaaacaagaagggggcctatccagttgggaccacaatacaaaattgaatttatcatttatgaataatggcttctagtttttgagtacttacagggtcccaggcactgtagatggtgggacgtagacggtgggatggtgggaaggtgggagacccagagagcttaagtgatccagccctagacacacggtgttagttaacttttgggagacacttcacaagctggtgtgaatgaaagaaaagcagcatgtacttttacaaaccttaatttaagcaaaggtaataaatttcaacctactcaaagcagaactagggtgtgattacttgctttgtaaaagattttttgctttggaaagttagaaatactggttttcaaaatatgttttgattttcctatctaaacctctattggattaaagtaaaacatgttgaccatattacgtggagaaatattgcacactctgtccagctatgctggatgaaaaggttgcagtcagtgaagggtgaaaaacttagtctagtttggacaagaagaaaaaattaacttctgaactttaccacctagatgtcactactctaatacttctcaaagtatagatggacaccacacctgctaatattgcatgttcctgggactcaacctagtctgaagaatcaaaagagtggtattagagccccagaatccatgttttaataagctccaaaggtgattctgcaccataatttgaatttcctttagatcacctcaatccatatctgttaacctctcgtccatattttctctttttgtgtctctttctgctgcgttctgaataattcttcttgagctatcattcagttcatttattcttttttcatctgtgtctaatctacggttaagtgggtccattgagtttttaattttagctacagtatttttcacttctagatgttctatttggttctttttccaaatatatttcatctttttttttttttttttcccgagatggagtttcgctcttgttgcccagcctggaatgcagtggcacatctcggctcaccgcaacctccaccttccgggttcaagtgattctcctgcctcagcctcccgagtagctgggattacaggcatgcgctaccacacccagctaattttgtatttttaatagagacagggtttctccatgttggtcagtctggtctcaaactcccgagctcaggtgatccacccaccttggcctcccaaagtgctgggattgcaaatgtgagccactgtgtccagtcttccatcattttttaatagtttactcttccctgcagatggacatattcaagctttgcttttatttcttaataatttactaatatgttcatgaaatttagtaatatgtttatgattaggtctgataattttaatatctgaagtctttacatgtctatttctgatatctgctgtttttactggtctactcatggtatcctggatcctccagtacttagtatttttgactgtatattactcattgtctttgaaaaattatttttggaaattcattgaagactgtgataaaagatgcctttctccagagagatttaggttggcttctgacaggttcctaggagtactaccagttcaggaccatttcaaaccaagtttttgaggttccctggaccatctgagtaatgcaaggccaaggtatacaatccatgagaaggccatccatggtgaataaatccttccacatctcccttgttgaatttgttgcaaagacagccttctccacagtcctctgatctggagaaggtttatttctggctcatcctcaccttaaaaattagcactttggagtccaagcataacagagggtctcctttagactctccactttggccctggatcttgacttaatgttcctctcaatttttggcaaaactgaaactcaagttggtctagctcaccattgcccttggaagaaaatttgcctcaattttccagatgcttaccttttccttttttttacttttttgatgatattaagaatcttaaaaaatatattttactctagaattaggttttttccccagtaggggagatggtttgcatatatagctcgccatattactagaactggaagtctctgcgctagaattatagaaccattcctctgtttattccagcccatgatgttggagagacaaaactgaagctgtcctctggcctgtagttgggtagaatattttactgacctttgcccagatctttcacctttgttctccctagagtgtttccaggtatctcaaatgagatggaccaagtcttaaagcaccagtaactttaatgcaataaaaagatcaaatagtacttttagaaggagacaaaggggattccataaaaggtaaaaatctttagatgctgagaatttagggtataggaaccacagctgttcagatgaacttgggctagtcttccctgtcacgatcaccatgtgcctctagacaataaatgcagtttgaggaatgcagtggcacaagatggcttgtgttcaccactgagactgataaatgagagctggaaagagtgctccagtgtctgtcattgaaaagtggggagatagcctgtacctgggctccctcactgtcgagttcattattccctcacatggattaattggcctctcgaggtgagattgccactggttctgaaggatgcctctctttaccacattattgctcgcccttcactctgcttctgaaagtcacccttgaaaacacacattcttctctactggtgaagtctgatttatcagccaactcctcagagaagaaataacaagataaaaacctctggctataaagcactgttatgcattatgctctgttggctttatgtctagacagagctaagagacgcctttgtgaccctagcaatacctagagatgactgtatatttacctctttttagaagaaagatggacttgacatttttatatattagaggccacagaggcaaagaaagctctagccagggagacaggaggtgacactttaaaaccctggtctgcctgtccttccctgaatgagagaaagtatagtatagccttgcagataaaaacagaccctggagtcaccaactgcctgggttcccattcctcacactatcactttttaattctatgacctcgagcaagttactcacatctctgtgcctgagttccccatctatgaagtggaaataatggtggtacctatctcatggtggtgttatacagatcaatcatgtaaggtacttagagtataatgcttgacatgtaataagcactcagtaaatatgagatatcatgattattatgctagcccagagaaactacggtatatgcagttgccggcaatgtctataaaatagtcttctcttgcagtgagtcacaggagctaacagctcccattttgaaaggggaaattgacaatggtagctggcttatttgagagagttggtccacatccaaaaatcttttcaggccagtacattcttgccagactgattgcatgtgtggtctagggttaccatgttcattgccaagagacatgtgagttactgagctaggagaaacccaaattaggagtacaaggaatcaggagatctctgggaaatgcagtcagaagactagatagcactaccaggcaggtccagattcagaattagtgagacggatggggtatgaatcccatactcaccacctattcctgtgactgatcgtggctgagtgagctcatctcctacagattcatgcacttgcatatggctatgagattttgtttaaaatgagcccccctgtgggttacgtgggcatatgcatttttcagaagtcatagcctgtatactcaagatgtgtgcattttgctgtatggaaattacacagtttttaaaaaatgagttattcctccccttaagttgatagtggagcttgcataaatgtgcaggtggttgccatggcccacaggggatccatttgtgattaccagctgggaggagatacacctgcttgcacgtctctagcagatgtgtgtgacctgcccccaactcctgctaattctggcccctttcttagcctcttctcctatatccatctttccttggcttcctattacctttacttcttttctcagatcctagggttttttttactcttttaatttacatttagtctttccttttttatgatcagaagtaacctatgcatattatgagaaagagcaaactgcttagaactatataaagtaaaaagcaaaagttgttttcagttccccagaagtgaccagcatgatttggtgaaaatgcaaccagacttttctatatatgcatgtcgtgtatctatgtgcctatataatacaaatatatagatgtgtagatagaaaaatacctacacatatatagggttatgttgttttattataggaacggaatcctacaaaacatctttcatggcactacatagagcactgccaccccattctttttcagtggctatcatatatccactgtttggatatattaaccactcttttttccgtatttctaactttagtcaaggtggacatacagctcagctgagaagcagacacattgtgaaatggactcccccaaaagagtttcatctgacttatcccttctccgcaataaaatcttggattctgggtgtgtttgttttagatgctgtggtaccggctggttttagcaacaaggacagtgttggtagggtgagaaacactatcccaagtcatatgtctgtgtgactacaggacatttcttttgaatgccacaaggatgatttatatgattactggagacaagcctctgtctcctgaagacaggccaagataacgttagattgaatttcaagagatgaaagtgaggtttttaagtaatagcaaagccttgtgtttctgtagtactttgtgctttttgaagtgctttcacagtcattatcctgtttgatcctactaagaaccctgaaagtacataggttggtggtttttatcctgagactacaaatgataccaaggataacgatgagtaggaatcagagctagaattaacccctattttcttactattgacccagcatgctttctatgttgaaaagtgcaccacatcgagaagagattggtcaccgcagcacagggcacgcagaattccattagtatcacttacctgggaagtccaggtgccttcaatagttgaggggagtaaatgatatgactacctaccttcaaaacttgtagtttaaagtggtaacttgaatactcacatttacctctgtttccttcctctaaaagaatggttttttaaagggtaaatccacagggacaaagaaaaggagaggaaaaccagcaaaaaaaaaaaaaaaaaaaaaaaattgtggaagctggagaacaaatgggtgagctatgactggattagtgaactcagaaaatggaattctaagctggcactcaggagaaccaagaggcaaccagatatacttccagaaggcctgggaattggcaacttgagataactctggaaacagaagagatgggctaaaaatgggaagattagttgaaatttcgttaggaagctatgacactttcatattccttccctatgctacacagcctagcgactgcccctctcacacccaggcagaagactggagcttactctctgctgagggtagaacaggtctctggaataccagatatgaagcacagctgagaatgggggtccgtttctgaaaacagggatttagcataagtcaacataatgaacattgaaactactagcccttttcctcaagtcaggtcccagaacacagccagccaggctcatattccttctaagcaggagtttataaaagtcttctttgggaaaactcaccagtttaagagattggatgtcaatgaagtggcccaactgaatcatctaatggtgaagcccacaaccaagagctttttttttttttccattttttaaaataaaagctttattaagacattcacatagcatgctttcactcattgaaattgtacaatttgggtttttcatagaatttgcaaccatcatcacattaaacatatttatagaatttgcaaccatcactgcattgtctacttgcagaatttgcaagcatcatcactataaacttcagaacatttttatcacctcaaaaagaaaacccctaggctggatgcagtggctcacacctgtaatcccaacactttgggaggctgaggtgagtgaatcacttgaggtgaggagttcaagaccagcctggccaacatggtgaaaccccgtctctactaaaaatacaaaaattagctgggcgtggtggcacacatgtgatcccagctacatgagaggctgaggcaggagaattgcttgaacccgagaggcggaggttgcagtgagccgagattgtgccactgcactccagcttgggtgacagagcgagactccatctcaaaaaatgaagaagaaaaaaaaaacccttgtcctttagctatcaccccctgcacccccatctacaccctaggcctacgtaaccacgaatttactttttttttattattattatactttaagttctagggtacatgtgcacaacatgcaggtttgttacatatgtatacatgtgccatgttggtgtgctgcacccattaactcgtcatttacattaggtatatctcctaatgctttccctccccccttcccccaccccacaacaggccccactgtgtgatgttccatttcctgtgtccaaatgttctcattgttcagttcccacctatgagtgagaacatgtggtgtttggttttttgttcttgcgatagtttgctgagaatgatgacttccagcttcatccatgtccctacaaaggacatgaactcatccttttttatggctgcatagtattccatggtgtatatgtgccacatagctttttagtgtcccacacttaaaaatgagtgtcagccaaggatcaccagacatttgacacttgacagaaaccttgaatatgaaagacagaacactcacacatctagggggaggggggaggggaggaggaggagaaagaggagaaaagcattttggagggaaacaggctatatcaagagaaggaaacttaaaacagaaaaacctaaaagatgactgaagatacagaatccttgaaataaaaataagatgcctcccctcttttaaaggactaaacaggaaaggactcatagaaatttaacttgaaaaagttgggattgtttaaggtcaggaaatcaagactagtgtgggcaacatagtgagaccccatcttcacaaacaatttaaaaaatatattagttgggtgtggcggcacatgcctgtagtcctagctactcagttggctgaggtgggaggattgcttgatcccaggagttaaagtctgccgtgagttatgattgcaccactgcattccagcctgggcaacagagtgagaccttgtctctaaaaaaacataataatggaaaaagttaggtcataaatttgaaggtatatcccagaaggtagaaaaacacaaggaaattgaaaataagaaaaactgaagaccgggttaggagatatatatccaaatcgtaggaattctagagagaagagagaaaaaaaatgagaaattgaagaaaatgctccctgaaccaaagaacagtggttttcagacagaaaagagcccacctaatgctcagattggtgaatgacagtaaaccacaccaaacacatcattatgaaatttcagaacattgggcaaaaagaagatcctacaagtttctagagagggcattacaaaaataaatacataaatgaaagtaagtgtttttacaaaggttcaagaatcaaaatggtgtcagtcttctcaataacattggacatgagaagacagttctgaaacaaatcgtttcaactcaagttctgtactataaagacattttcagaaatgattaaaaagttactctcatacagtcctttcaagaagctgctaataaatacggtctaccaaaaccaagggagtaaaccaagaaaaagaaagacacaggatatgggaaattggggatccaaccttagagagtgaaaaggagcctctggaatgacactgaagggccatcacagggtggcggctgtgtatcaggcctgggagccctttgtccagacagtggtggatccgaaggtgtggggagagatttctataggaagaacttgataggccaagtagtatggtggctcactcaggcctgtaatcccaacactttgggaggctgaggaaagaggatcacttgatgccaggaatacaagaccagcctgaacaacatactgagaccccatatctacagaaaaattaaaaattattatagctgggcgtggtggtgctcgcttacaatcccagctactccagaggctgagattggaggattgcttgaacccaggagtttgaggctgtggtgagctatgagcgcgccactgcactctagcctgggtgacagagcaagaccctgtctctctctctctctctctctctctctctctctctctctctctctctctctctctctctatatatatatatatatatacacacacacacacacacacacacacgcacgcacaaagaagaaattgatagaatacttaatgtatttgaattcgttgagaagagatttatgaatctgggaaagactttgtgtttgaattattgagaaatatatggaatgctaaacaaatggggagggggaaacttttgttttcccaggaagaaaagtgttcaaatcatagtatacctgtgttgttcatctgtagcattttcttgatcaagataataaaaacagtgattatctgtaattactgtctaactaaggggcttgaaaatgggcatatgtgtggcagtggcagagatggtaataaactagaactaaatcctcaccttttagagtgggaagacaatagataattcctcaaactaaagaatcacaaagtagcatacaagcatgctatttagagataaggcagtaagctttcaaaagagctaaccaaaatagtagaaaatgactacttctggaagatgagggtcaaagaatgcgatcgcttttatcaagcctcttacaactatttgactctttaaattgtgtgcacatgttactttgatagaaataaaagtggaatttcaagaatgcgctggtaggaacaattggtctgtgacactacttgcactttaaacgtgagctatcaaacaaaaacctctttcaagcatctctagcctcgcaacagatgatctgggcatgcagaagaccactgcacccccacttgtctcccaatcttggatccaccttaatgatggaagcacagatgctgtgggaacatttcagaagcctgtgacctgacttttttctctgcaggtaactgcaggatgagtggttttttgaaaaacccaattctgagcattttggtctaccacaaactagaggagaaggcagaagtgccatctaaatgggtttgggtcacacacaaagcatcacaaggccgctttgtggggtaagttataatgctgccctgctcttcaaagcaaagccacatgcatatatctggcatatgtgcaggataagaattcattctctttttctctcacactcctaggcaacctggattaggtccagggcatgaattgtgacaccttccattacaaactccaaatgcagaatgtgttaccggagttgtctccctggaaccttttagggtgaatgatggagactcctttcctgagatgagatcttgccacttgctccccggccaaaccagccaaagcctcaggggccaaatgcacatgctcgtgagtatagcaattcagagcatggactttggagccaaactcaacggagttcaaatctggaccttgctacttactagctgggtgcaactcagaggaagttactccacttccctgatcctccattttctcttctgtaaaatgggaataatagtagtgtctatgttgtaacattaaagaagacctaggatatgcttttagcacctatcatacattagctattaactcagtattatatttgctgtatcattgtgggaaaatcacggaatctctccgagccccagtttcctcatctgtaaaatgggggtaatgctgcatcctcgagagtgttgggaacattctgtgagccaatgtatacaaattgcttagcccaaaatatggcaactagtgagagctcaattcatgaaggtgattattactttcctgccttttcctttccacagcttctctcctaattcaggcctactttccttttgtctggccaccaaaatagcttatctggccaccctgagtctctctccctctttctgctgtagctcatcctgcatacagtcgccagaacaattttacatcaacacggcttttatcacttcccacacctgctgaggagcccactgcggttagaagatcgaaacaccccagcctgttatttaaagctttgcacgctgagatgtgtgctttgcatcttttctgtccagccagtcaccttattcctcatctacctttgtgcctactgcctctgtgtgctagatgttgtcgcatgcccctcccagctctcctgttaagagcaccacttagttttaataattgatttgaaatgaaacccacttctttcaaaaattcgccctgacacctttaccctcctcattcctttatgccttgtcttagcagcctttggggctatagccagcactggtctcatgcagctttgagtaaatttccttgtcctgaaaagccaccgagtgtagtggaaagggcttgaggctttggaggtctgacagatttggattcagatcttagctctgccacttactagctgagacatcttgggaatgttattttacttctcaatgttctcaccaaataggaatttataaactgggaatactgtcattattcccagtttacaaatggggacattgagaggtgagataacacatgagattattattacataaagttcttagtatcacatctggcatttagctgcttacatattacagttcccttccccttgttgtttcatttgtgcatggttttttgctttgccagaatacaggctccttaggtgcagggcccggatgttttgtctgtgtaccttagccccctgagttggtatatgctaggtggtgctttggtaacttacaggcccaagtctcagcagtttcaaacaatagaggtttgtttcccacttgctttgtaggtccgtgatggattagtagggcaggcgtctctcatcttagttacccagggagctaggccactcacatttcactggccaaagcccatcacctagccagatcagaacttctaaggggccagggaagtgtaatcctattgtgtatctggaaggagagaaattcaggaacattttcaaccacctagtgaccaccatatcctccaggtcctatctcaggtttcctgtgtggagatgtctgttggcaagcctggtgccaccactgggcatatggtttactcccaggacttggagtcttggtgattagatacagtcctattctccatgggttcatggttgcccaactgtaattcacaatctctgccagaaacccagtgtgaatccacttgtcttagaactcaaccatacccctaccagtaaggacacaatgaagacaatagctttgtcccatctgaaaaaataagcaatgttcagggattcccagttctctaaaactctgtcatccttgactcattcattcagtccacaatactagatttgtggagatttgctgtgtgtcaagcacaattttatttacaacaatacggtgatactaagacagatgtggtccctgcctgttcagacctgacaattaggcggagaaggcagtagtctaaaataattaacagaatgggctctggagtcagacagctcatcactgggcttgcatttcttccaatcaaccttgggaaagttcctaaacctctctgtacctcagtcttaccatgtgcaaagtgggagtgaggaccatacttctgttatagagctttttaaaagaggaaatgaggttggtaatccatatagaacatttcataaagacatcagcttctagaaagcccttggtaaatgttagccacggctgctatcatcatcttcatcatcatcattaccatcattagtagtaacagtaggagtatttaggatgaatagtggtaggatgaggaagatgttgagccagcagggaaagttgtgcatttttctagaagcatcgtactatgttggcattgcacataagtccatgaaaacctatttcttatggaccagaagcacactgtgaacaccaccattctagttacacctaaccactgtttataacattgtgcagggtccagctcatcccctgttattggccatttatgttgttccaactgattctctgttgttggcccctgaagtcccaccgtctaattccttttgaacattcaagtagcttttcatgattaaggctcagagtatagaaagaacagctgaataggaattgaacattttaaaatagggagaaaggactcataattctaaaagccagactaaagggctgcaaaacagcccttcgatgcatcagacttgtgcctgtgtatatttgttcatggcctgactttgagtcactgttcttaaggaaaaatatattctaaatccctctgtggctcccctcctcagtcacccaagacacttgacccagcagtgacatggtgaatttggcattgaagcaggaaagacaggagagccagagacatgccactgttaattccccatatgtgcataaaattcagatacctctgggtctatatttacttgtgtttagcatctgcacgtaaagaaagggaagttaccccctgctacctcccatcagtcaagcatcacctgattcaaggacatactaagccacagtcagcccatcccaactttttgccaaaatgcctaccccaaaagacaaaaaaaaaaaaaagcataccccatccaaaaagctggcctaattaaatcctgacagactgctgctctatttcacagctgcctagtagctgggtctgtttctgagctctggcaggaataggatacatctggctttactgagttatctaatatctttggcatgagccagaaaatggtggaaatggtagaaaatgtgttcttttcttactctaagacacaagggagttggaaaaagcacatttttttcctccacatttaaaaatgactagaaggtgagagagaaagagagaaagctcacctgcagccggtgaagtcacgcttttgcattccgtttgtaggacaagttgtcagtgtgcgatgatttccataggctttgaaatggggtagcagtttaaacatatcaaatgcttaatgaagtgaggccccatctcatcggtattcagtgtggcactaacattacatacgctaatcctgaaacaataagctataaggagagcctcgctttctgggtttgaaatgaatggagcagtctgaattcttccagttttatctcctgctttaacctggaatgatgccagcatgttgggttttaccctggagaattcatatcatgtgaaaaacttaaatcaggtctgtctgctggtacacgcagtcctaatccgttaaatatttctagctaacaatgcacgtggggctcttcagctctgcatacagtcatgttctgctaagtccatgcaaatataaccacttctgcctgcttttttgagggagggatcagtaatgcctacatggttttacccaaatccctcatgcgacatacaaggctcttggcatatcttaaccctggtggtagctccctatccattctctaggacctggctctcttactgtgagcttgggaaggtttcaaatgagagattgcttcactttcattggtcatttaaaaggaaccacaactcttgactttatcaagtgatagaaacttgagcccagagtcccggctgtagaatgtctaaagagaatgccactgaaccccatcattccctacgcccttctgcattcagaaaaattaaaaacattaggacttgtgtgaaccatgtatggggcatttttcttcagagtcaagcactgctgtctgaaaaagaacacttctttccagaaaactctgttttttcagaacgacctctttcattctgctgcctcattcccagaggagtgattttgtatttcccctcatccaaacacggagatgactttttcaggattgtaaaaaggaatgtgtgatcaatcttttatttaatacatatttatgaggtgcctctgtgtgtgaagttaagtgctgggtaaaagggcagtgtagcatcacagtcgcaagcatggattcgagagtccaactgcccgggttgataactgtgtgaggttgtgctgggtacacagtctttctgtgctgtggtttccccttcaggaaaatggggctgttgaccatactgacctcataacgaagtccttggggtctgacacctagcaggtactaagcaagtgttagctgccactgctgccatttctgctcctgctgctctgctgttgatctcattactgttaccttcatctttactattattaggtgctgggaacaaagttgtccaccaaaacaaagcgaaactatacccaccatggttcctgtccttatggagcaccaagtttcctgagggaggcatacactgaataaaagactatagaccaggtatagtggctcatgcttgtaatcccaacgcttttggaagctaagcaggaggatggcttgaggccagctgttcaagaccagcctgggcaacagagcaagtccccatgtcttaaaaaaaaaaaaaaagaaattaactgggcgtggtggcacacacctgtagtcccagctactcaggaggctgaggcaagaggattgctccatcccagaagttcaaggctgcagtgagctatgtttgtactgctgcaccccagcctgggcaacagagggagaccctgtctctaaaaaataccaaacaaacagaagattgtagtaaatgtataactctagcatgtgctatgatgaaagagagataactagatttaggtgaacatgaataaggggatctgtcataagcatgaaggtcatcaaatgcttttctgaagagcagatgattgacctgagatgaaggagaggtcttaattcaatacaagatcattaactcagaaaatatagaaaaataatacccccttcacattgcatataatttatccatccaatcatagccattattaacattttgctatatatagccctctacaccttctttatgaatggttagaaatacacacacacacacacactttctcatcaacataaatggcatcctgctctcgtaaaagatatactgtccactaatgtgctgtctttaccaagcagcatgctgaggatacctttctgtgtcagccagcaggaccaacatcctgagagccaagagccactgcagaccttccagctcagttccgtgcctggtttgcttcccccccatcccactcctgcctctgcatgaagcagggtggttctgcttctagagccagccttcttcactctcacctgacagctcttggcacacacctagctctggacttccatctatttgcaaggctacctcctggcacctgcttagagcctccaggtaccttacagtgtattctcctgatgtgcaaattggatccagaggctttatggctgtgtctgaacacttcatttaggtttgtgatcaacatcaacatttatgggcttatctggaatgaaagcctctgtttacacatttggaggaaaaatgtatccacaggcacagcaccttatttcttgttttgtttttttttggagatggagtctcactctgtcgcccaggctggaatggaatggcgcgatcttggctcactgcaagctccgcctccggggttcaccccattctcctgcctcagcctcccaagtagctgggactacaggcgcctgccacctcgcccggctaattttttatatttttagtagagacggggtttcaccttattagccaggatggtctcgatctcctaacctcgtgatccgcccaccttggcctaccaaagagctgggattacaggcgtgagccactgcgcccggccacagcaccttatttcttaaaatacctttcatattcctggagccagagcactaaaggatcctgttaaagaatttgctcctagggtcttaagagactcccgaatcttaggagcctcttagaggatggattgtttcttctgaaattgttgaaggctcagatcacgaaagtcacctttatagaagatacttctatgggcttaaaaagaaatcaatgtctttgtgctatgttaatttgctttccacctctttctcctcctcatctactcaatacaagttgattcattcatctcctctgtggtacgatcgaagacatctctcaatgagggtccctgttatataatgttaggagtagcaggaagctgtggttctacacacacacacacacacacaccaccacgcacgcacgcgtgcgcgcacacgctttctggctcattccaggtggattgacagccgctgcttagcatgtcacaggcctcaaccttctaacagtagcccgtccagcttcctttgtgtcataaagagttgtcttctccctcttgagttgatttttctcttatattttcctttatattctcacagcttaaccctgagtcagtccaaaatgaataaagtgagtaaccaaggtcatctaataaaactgtggaatgatctcacagtctgcttaggctgccataacaaaataccatagactggagccaggtgtggtggctcatgcctgtaatctcagcactttaggaggctgaggtgggcagatctcttgaggtcaggagttcaagaacaggccggccaacatggtgaaaccccatctctactaaaaatacaaaaattagctgggtgtggtggcatgcacctgtagtcctagctacttgggagtctgaggcaggagaatcacttgaaccagaaaggcggatgtgtagtgagccaagatcgtgccactgcatttcagcctgggtgacacagcaagactccatctaaaaaaaataataaattaaaaattaaaaaaacagaccaggtggcttaaacaacagaaattttcagttttggaggctgaaagtccaagatcaaggcccgccaattcagttcctagtaagggccctcctggcttatagacagccagcttttcatggcgtcctcctcagcacgcactccggtgttccctcttcactggggcgctaatcctagcatgggggtcccactctcaggacctcattactccctaacctcccaaaggcttcatcttaaccaccatcacactgggggttaggacctcaacatatgaattgagggggatacatacattcagtccataacaatccgttttcaggactcagggtcaagaaaggcatggccaagataccacagctggcaaaagctaaaatctgaactgccaagatggcaggccatcaggaaaaggatggagaggcaacatggtgatggggtgggggaagacagtgttggcaccaaatgcccgctctgccacttgctggctgtgtgaacttaggagcatacttaatttctctgaacttgcctttccttctctctcaaagtggggccgatggtgctcaacccatgggcttgcagtaagtgttcttctatcaatcagccagtcaagaaataatgatagatttatatgtcaggaactcttaggtgatgaaattaaatgaaactcttgcttatgctgaaagctcagtgcaggacatggtagacacatgatcaatgtctccttcctggtcccgcgcagaagggatccccaaaacaggattagtgggagtaactcaaataaaagacctgatgggaacagagtgcagtaacagagggggagaaagaaatgttttctgttggtttgctgagcatgaaagtgaagtttcttgcatgccagattgcagttgggtcctgaaaatggggaccagtagagttatttgaaggtagaagtgtgatggagtgacaatggaaaccacatgctggtcttctttgaaggctggagatgtaatttctgaaggacaacatgataaaccagcaaccagaagacagctggaccactgacagccctccccactcaatacaagtctttgttgctgtatggtagaaaaaatagagatgtgagttctgagacatttatgggactggccttttattatagcttgacaagtacaacactgcactcaagttagaagtaatcacatcacatttttagtgcccattgtaagtctgaaaaaccagatttgccataatgcctggtagtgggatttttttgttgtgggtttttgtggggttttttgtatcttttaaattaattttcaattaagttttgaaaggacaaagtgtaaaattaactaacttgcaattaatttcaacagtcattatgcaaaaattctaggcatgtgaaagatggggagcacggaataattaggcgtggattttttcacttccataattacaacgatgaatatgcatgaaaccatttgggaaaggaacacacagcaagcaattgtatttaattaaacttctagctggcttagccaggcaagcctgccttgtgttgtgttgtagtctcctcaaactattagcaaagtctttccaaacaaatagcaccccaaaatataaaagaggcagttgctggaaaggaggcagtcgcggatgtggtttttctcaactcttcctttaattttcagatttctagcttccttggaccttaggcatagcatgcatcattgtccaggtgtgacctgaacagcaataccttggaatagatttttatggcaaataagcacagctcagccttatgcaaatgccactttgtttcatttccaccttgtgtcaaagacccctccttgggtacttcctggggacatcttttttttttttttttttaagacggagtttcactcttctcgcccaggctgtagtgcaatggcaggatctcagcccactgcaacctccacctcccaggttcaagcaattctgcctcagcctccagagtagccagaataaaaggtgtgcaccaccacgcccagctaatttttgtatttttagtagagaaggctactatgttggccatgctggtctcaaactcctgacctcaggtgatccacccgcctcagcctcccaaagtgctggtattacaggtgtgagccaccgcgcctggcaggggacatctttatctataatgcaggatgtaggaattggactatagcaggaatacccaataataatagtaacagcacctctcacggttgagccattcctacaggccagagatgctgaccacttgacatgcatctttcatcttcctagtcaccgaagtttgagacttgaggaacttgttcagagtcacttgcgtagcaaatggcagagggagatttgaaccacagatcctgagatctgtgtgctgtgtgccactcattcactatcatttttctccaacttgagaaaaagaaggaaattattgtaagtccccacttttcatttttcttcaacttgagaaaaagaaggaaattattgtaagtccccagtttaggctgtagatggaattcatgcatctcccttgtttttccaaggtcaccttcatactacagatagatgtcccaggggcacctaagtcagtaaagtcagaccctgacagggagctaggaagaaggacacggcggagggggatgtgatggtggcactggcagcagcagctgcaaatatttaatgaccccttagactgtttgccaggcactgtgctacatacttatttaattatgtgtttttatttgtcttaagagacagagtcttgctctgtcgcccaggctggagtgcaatggtgccgtcatagcacactgtgacctcaaactcctgggctcaagcgatcctccctccttagcctcctgagtagctaggtttacaggagcatgccaccatgcccagcaaatttttaaattttttatagagacagtgtctcactgtgttgcccaggctggagtacggtagtgcaatcatagttcaccgtgaccttgaactcctggcctcaagcgatcctcccatctcagcctccaaaagtgctgagattacaggtgtgagcccccgcgtccagccctgtgctacatactttataacgaccatgtctgatcttcacaaacacctcatgagatgcatgctcttatccttcattttacagatgaggaaaacaggctcaggagtttaagtaacttgccacagttgcaaagccaataaatcgtagagccaggattcagacatgggtctgtcagcctccagagtctgtggtctgtgttggatgtcagtgcatcatcgtctcaactcctttttaatgtccatgggcacccatccaacaggtaggaaaacctggcccaacaaaggcagtctttaattttgctcactggtggtaagagccggagtgcgagtgttggacatcttggaaaatttccccaggcggcacatgagatgatatttggatacttgcaaagaactttctagaatctccacagcaaagagttaaagaagtgtagattgtccctcactgtaatgattacggggtcttgtttttatttaacatggagcactttgtctgagcttctcatttccaaatgcataaccccagaaggcttctccacccttgccccttcactgttaggtcacaacatctcagctagtgactttctttggtttgggaagcacactttttgaggtcagctgttactttctggaatagtgtgtgatttctgaaggcagttacagctcaccagaggggccaggatgggccccagtgaatgctggttcaacggcacttttccaattctcattaagcacaatggcttttagtttaaaaaaaaaaaaaatccatcacagacgtacataccagactgccattagctgacccggggagaaccttttgccaagtgaagcaatttccttcttctgtagttaaagcaatttgggggctgaatgtatttatgggcaaacttggtgaagtgagacagaagcattttacaatgtgcatgtcagaggaaaatcggaggctctgggcagaacatcctgggtatccccttgtcataaatatggcatagcaagggggtcaggtccaagccatctcttcctgctatatccggggcagcataaagagaccaggaaactgaggtacaaagaaggtaagtagttggcccaaagtggaaaaacgagccaaccagtggccaaacagttccaggcttggtccttcttctcctcccatgtccctcctacacttagacaactcgtgctcttctttggcatgttgggtttttcttgatgtcattggagtttctctctctttctttttttttttttgagatgaagtcttgctcttgtcatccaggttggagtgcaatggctgctcattgcaacctccacctcccgggtttaagcgattctgctgcctcagcctcctgagtagctgagattacaggcacccaccaccacgccctgctaattttttgtatttttagtagagacagggtttcactatgttggccaggctggtcttgaactcctgacttcaggtaatccacctgcctcggcttcccagagtgctgggattacaggcgtgagccacagtgccggcctggagtttcttctttaatggtttcagttttcctctggttcttaagtttgcaaagttttcctaagctatcatttcagtatttggacattcctgtctcctgccagacagtcacttgggttgtcacattggcacttgttctgcagaagtcccttgagcacctatgacaacaggctggagccgcctattcttgcccccgccctaatgcacagcccccatcttcccctcaggttcccaggttcttcctcctcttcatttataagtgacttgaaactaagaggaaactaagatttatagtttccaagctcagctgggactccagcgccatgttctgttcattttggttttgccttattcttaatggtaacagaaacctacgaatttaggacagattaaggcaacaaagccattctgtgttctccgtggggccgggggattcctgcctttagctgagcttaccccacatttgactgtcatcattatgaatgccccaaggcagcttacagctttctcttcctagaggaaaagcccagtattgtggctcttttcgtgctcccctctgcgtcttgaaaagtgaattccaaggagtaggacagtcaccggcttcacacagccctgtcattgtcttggtgtccctgatgaagggctgttgaaggacttttatccacagagagaattgataatggtggagatgccacagatgacagtatctttagctgaaggtgtgaagttgagggatgtaagcagaaggaagcaagaaggtccacagcatctcctgttattcccccaaagtctttacagatcaaaaaagggtttaagagctgttgtctgccatcaagcaagatgcctcagaatagctccatttggggcctgtgctgctgagaccacaagggaagtttgtaattatgactgattatgggtttttctcctcggaagccaatgaaaaaatacaattagctgagtctccctttatctccctcatttgtgtgttcaattagtgcaattggacatagatactgttacaagaggagctttgccggcaatgatagggtggccagcaaatgctcagaagcgatgagtagaatattaattgacatgaatcttgtttatgctcctgcctggaagttcctgctccctgggtctccagtacagattttccgttggtgttaacagcggtgtctccttgttgctctgggtggaagtatcaccagaagaagcacttgatgtatgaaaatagcagaattaagctagaggccctcaacttttggtctggagttatttcttatttcttctcaacttagaaattcaaaaattggagaggaaaatcatgaagagtcgagaaaattacatccttgttagagaagcaaacattcattcttgaaatatcgagtggtgataataatgcttctaagagttaatactgtatgcggtaggtgctggggctgcctgttggtcctgaacccatcatttaaggcttattactacatattagctttacagatattttagaatactaatatatatgtgcaaggctgagctaagtgcttagcagtgagagggatgggttataaacatgactgagaggagaatccagcccttgacaagtttaatgtttgctttacggaagactagctatgtccgtaactctacaacgtgggagagagtaagatgtgccatgacatgggtcaggtaaagcacagtgggaggcagaggcagagcgtggttatttctagttagggaactcaggggagaagtcaaggagaaagtggcttagtggccatttgaatcttgaaggctggccagatgtgaacaggaggtcatgttggccaagagagcatcaggctcttatacgaggtcaagagagcgtcagtcctaggaaggaagcacctctagaatgatttacctgtacagccctgtcactagcaagacttgttgattttacttttttttttttttttttgagatggagtcctgctctgtcacccaggctagagtacagtagtgcgatcttggctcacttcaacctctgcctcctgggttcaagcaattctcctgcctcagcctcacgagtagctggattacaggcgcccccgccaccaagcccgggtaatttctgtatttttagtagagacgggttttcaccatgttggccaggctggtctcaaactcttgacctcgtgatacacccaccttggcctcccaaagtgctgggattacaggcatgaaccactgcacccgaccctgattctactttttgtacacgagtttctctggcttaggatctctcatgtgattgcacttcttctgtctgctggaactgtggtctcatctgaagtttcaactagggggtttccgttccttgtgggttgctggaatgagagcctcagtccctcactggctatctgtttgctggaggcctccctctgttcctgggcacgtggacttctccatagggcagctcacatcatggttcttagagcaagcaaacgagaaaatgatcaagagcaggtagctaagatggaacggaaaccacagtcctttgataacctggtattggaagtgacatcttatttccatcatctttcattaattagaaatgagaaatggctgggtgtggtttttcccacctataaacccaacactttgggaaacagagggagttcaagatcagcctgggcagcataaggagaccctgtctctaaaaataatttttaaaattagccggcatggtggcatgcacctggggtcccagctactcaggaggctgaggcaggaggatcacctaaggctggaaggctgaagctgcagtaagccatgattgtgccactgcactccagcctgggtgttggagtgtgaagggctattgaagggcttgtatccacagtgagatcatgtctcaaaaaaaaaagtgagaaataagtccaaccacaactcacgggaaagggatcacaaaagggcatgaatctcaaaaggcaggcattggaggagctgcctcagaggttgtccaccacactggggaagggaatagaacatctggagcgagggcagagagagaacacgggggctgctcagagagggcctcctaggtctttgtaaatgcttaggttttactttaacaactgcttatgtatgaaacagcccacctacgaggatttttatcataaaagattataatagaaaagtttggaaatagatagatcctggttataaataaatcatttctacatctccacaaatggcacactcactatgcagctattaagaagagttagagttgattctaggcctggggctgggaaatacaagatgagcccgaagcatcttctcccagaaagtaaacaagtagcccccaaaccaaacaacaaaaaaataagaacatggaggtgcattgaaaggatgcgggagccaacctgaaagtgttccccgtggccaaaggtgaaacaacctgagcaacaaaataaataataatgcctttgttttgtgctggtgtgacaaaatacctgagactgaatcatctataaagaacagaaatttgtttcacacagttctggagcctgggaagttcaagatcaaggcgcgagcaggttcagccatctagcgagggctgctctctgcttctaagatactaccctattgctgcatcctctagcgatgacaatcactgtgtccccaggtggccgaagggcagctagccaaacattgcatgatgccccttccgtaagtgccccaatcccattcctgaggagagagccttcctggcctgatcgcccttaaatgcctcacccttcagtaccattacattggcagtacttgtattttggagggaacccattcaaataatattgggttttataactcagagagtagcttaaataacaagtccatctgaagtaaataaataattaataaataaattggagaaagcaaatcttccttatagaaaaattgtaattattgaaatgtagaaggaatcaaggaaataggggggaaaaaacaccatgagaacaacacagtaatatttgctgcaggcagcaggcaaagtccatgatgaatgctaaaattagtgggtgaaagtttaagcagaaacaggatatttgcatagtttcaaagaatctcccccaaaatatttattgactacaaagacagaaatagtaactttgcagtgaagaatcctggcagataaagtgatcaaagttaacatcatcagtgaatgcatttcaggtatcccctgatgggatacactgaatatgctctgatactcttttcaataatatatattctcacaattgtgaaactacatcagaaaaacccaaattgagggacattctacaaaataacttctcgatcctcttcacagtattaaagtcatgaagaacaaggaaagactgagaaactgtcaccgattagaggagatcaatgccatgtgggatcctggcaaaatttgaatcaattctattaacttagttaatacagttgttccaaggttaactcagttttagcagttgttctgtggttaggaaagggatcatcactaggggaacctagatgaaggatttgcagaaactgtacttttttttttttttttttttttttgagactgagtctcgctctgtcacccaggctggagtgcaatggtgtgatctcggctcactgcaaccttcgcctcccgggttcaagcaattctcttgcctcagcctcctgagtagctgggattacaggcgcatgccagcatgcctggctaatttttgtatttttagtagagacagggtttcaccatgttggtcaggctggtctcgaactactgacctcgtgatccacctgcctcggcctcccaaagtgctgggattacaggtgtgaaccaccatgcctggccaaactgtactatttttgcaactcttgtgtatgtctaaacttatctccaaataaaaaattaaattttaaaaaaggagaacctagcatatagaaagtgctgtataggtatttattaaatagacaaaatggtaattggttaaaagtatgtattgatgtgcttaattaagtaaaaaaatcagggtgtaaccatgcatgttaaaaccatagatatgtgctaatatatgcctgtactattcctggaaggcttcacaaaaaagaaactgaacaaaataaatgggtgccaagggttgcctctggggaggggaagcccatggctaggagagagatacatgaaacagacttatttttgtctgcaaatcctttcttactttttgaattttgaatcatgcatattttgcctattcaaaaaatatattttaaataatcttagccatggtaatcctgaggttcccagagctccccatccattccccaataactcatgccccataacagtggctcagaatcttctggcaccctggctggcccttagtaggtgctaggaaatgtaggatgaatgagtgaattcattctgctgcctgccctccgtgggattcatctttgtatcacatcagacggtgtaggtccttttattcctcttcctaaggaggccagcttgggccctctgttggcaacagaagactttgatttcttcactttcttgttttaaacacagccccattaatgtttaaaatgcttgtctgagctctccagtctgtcttaggtgtttcgagggctttcaacagggattctaaagcggcccagggatacttggttattatttcctctttatagaattgaatgagtaactttgaatcctccacagcccgagaccctgtagttattcatctattatggaacaaccgggttcagtgacccactgcccaggaggcccactggtgttggaatagagcctccagcaccttgtcttaaagaacattcaaatgctccaccaagacttcatttcaagaagtataaatatgagacatccaagtacctctcagaagacaggattgcacaggcaggcagtattgctcaaccacccagggaggtggtggtggcaagaacagatagatttttaactgttcaggtatttcatagccaagattgagaccaagtttgccatttcctgtaggaacatttcagtagcttacttctacagataacaaaaagcaaaagagctaatggagggatagcgggagaggggtgtgcttgatttcttccttgatttcttcatttctccatttattttctacagcagttatagttacctcatgctgattgccgcattttgtgtattagagtaacttcccaaagagactataagctgaataaaagctgtgcatctctaagctcatggttcattgtagtattggtctcctcaaggaattaacattagcccttcttgggtcagtttgtattttaggcttgatgggccctagagtcactgtctcaactatgcaactctgccattgtagcatgaaagcagccatagatgatacataatgaatgggaatggctgtgtaccaataaaactttatctatgaaagcagacagtaggctggactgacccctgagctagaacacaggatgctaacaggcaggttgtagaagagccaagggcctcttgtagagatcatatgtctaaaccattgctaggagtttgtatttccagtacagtgagcaatgcttggtgggaatataaagcaggaaacataccatggtcttatttatttcctaaaacgagctttctaggtgctgtgtggaaaatggattggagaggggcaagatcagaaattgggagaccaagtagaggttcacatggtaatccatgcaacagatgatggtaacttgtcccatattatggaagcagaatcagcaggacctgcccctgagttggacatgaatggaaaaggaaaggaaggaaccaggtttaacactgaggcctgcagctccagtgactgcctggggtccctggcccaggattgtaattgctatttaatgatgatacttgctttcccaactcccacaagtgaggttttatttgcaacaatggcctgcctgaagtagatttttctctctccagtttttagggtttgcttttccctgcaatgctatttgtgtgtgattacaccacactcacaaactgatcaaagcatctccgctccctgcatcctgcttgagttagcagtattcgctctggctgctgactcggcaggctcaataaactattgtattgtaattggccaagccttattactggaccagaaaccaactgaccattgagttcaaagaatgtctgctaagcatttaattttgcggcttccaccaaacactacaggtaaatagctacagtaagcaatagaaatagtagttctttagagccttccttattcagcaaattccagaggcatggatagtcatttccagatgtggcctgcaggagcagcccaggatatcatatataggaatctggatctggcgaagccactcgatgcagaggagacagatgcctcagaggtttccctttggatgggtagaatgattagattgatcccggtgcaggtgcatgagctcattaccaagtcccacccccttcccgtgctgtctctcattggcttctgctgcttttgtggcctgcagtaggagaggtagcaaagaactcctacccctcattttcactgcattcttctgttgacatttctgaagcaatgacacaattgagcagagttctaaaaaggccacctgggccctagctcccaattaccctctcactgagttttagtggcaatctgaattcctacttaaaaaatgccattgcactctagcctgggcaacagagtgagaccctgtctcaaaaaaaaaaaaaagcccttttctatcttaaacagccaattaaatgccttaccctccaaccagttctgcaactgccctgagtctgtgtcttagcaaagaggccattagccacccgactccctggcttatcactgggcccttcctcatcagacacagagatcaaattctgagggtgtacagcagctcttagcaggcttcaaagagctctgggactgctgggggctttcctccattctaagaaactctctggggtgaacagcttagaaattaggggccattgataccagttggctgttcagtagcacttattgaaaggatggaatgcagctttcagggagactccctgctcccatttgcccaaaggatggcagtggttaggcagatagaaaacctctgcagtcttttggaataagaatgactgaaaatttccagggaagtgtctacttcattcggtcttcagtttagaactttcttctctctctgtctctctctcccccacccctctctttctctccccctcgctccctccctctctccctccctgttcctcttccactccccctccccttgctttccctccctctcattttgaatttaatcctcgggcacttgtctcccagctctcaatggtcctggttcccagcatcctggcagatgggtctcctctctcatttccctctggcttggggccaggatggcccctgctgtggccggtctgaggttgcgcagctccagttttcccatcaccctcttttcagttaattttagcaacttgagttgccatggtaatggttcagcggggttttcatggctctcttttgattcagtcatttgctggtctgccctttaaattaaactttttcaatccgcatctaaattgggatgggtgatgtgcttggaatagggatccgcaaaggcgctccagccccatgggatgctttttttagacaggaaagtcagggtggatgtggggatgcccttggtttacagtggcccagacaatcccttgatgcttccaggcttgagaaagtgtggctgccactgtggcagaggccatggtaggaggcatgcaggagtgaaatgggacccccagggccgctcccaccctgggagtgccattggggtcaggcctgctccccgcacctgagcacagggcccagccaggatctgggctctccaagtggacgaatgaattgtggacccagccagactcccctccatcgcatcacagcttggaggctctgtgcccctgtgaatcccaactgttctccctgcctccctctcagcagcgttttctcttctctgccattcagcactcccaaggcccgttttaatctagtgtgaagggtcagactcttcgtccaggtaaaaggaaactacagaagcaagctcacagtcgcttcactcggctcaaatttaaaacagtcttcagtgttcatctaaactttgtggcaggtacaagttgttcatcctgattttacagtcccaattttaatcccgctgtcccttcattaaatgctttcagttgcctcttttaaaccagaaggctgtggggcccagcgttgacaggatttaggcactagtcaggcaagttgttctaggcgtggctggctagagaaggaggcagtgagagagaggagagtggggagaaagtgggggtgaagagctttgaccttcatgatgagggcgtgggacttgacccttggcaaataagaagtcctggaagggctgtgagtgggggcagacccaggtccagtctgcagggttggcctggagtgactatgtcaaggcaccatcttggccactttgggagaggagtctgcctgcactggccccacacttttggtcctgcgagttggtggatctctagatgattctgggaaagggttacattgatcccacctcatttgtgagaaggaagattctagaaggatgagactgtttttgtacagtgaacatgtgttttctctataaatcttgagctcagccagtgcccatcaataacagtgtgaatatttcagccacaagggtggttttcccttccccaaaacagatcaccgggaaaactggttgagtgggacctgccctcataccatgtgtcatctctgggtgttggccagacagacctgggctcgtgtctcagctcaatcacttcctggctgtgtgacctggggcaaatgacctcacttctctcagtcttctttttctcacctgtgaggctgaatggaatgatggccatgaaggcatggagtctcataggaaagatgcacaagccaagacttcacagggccacagagttagagacactctgccggcttctcccagcaaatttttactatttggagctttggggattcagggatgagcaagcagaattcagttctgccctcagggagttctattccagtaggaaagagagacaattaaatacaaatagaatgtacaatgacaggcagtaacagtgctgtgaaggtagacgaggtgggtggggggatggagagtgatgtcggtgggccagaaaggagtagagtcttgaatggaattgtgagtgatgcggatgccctggaaggtcgtgctaagcagacggcaagggccctgtagcaggtgcatgctgggtgtgttccagaaccacatcaaggaggccaacgggtctgcagcagcagccagggaggagcaggagtggaagtcagagtagcaacggggatgagattattcagggcctggaggccatgttaaggactttggactttattctgagtacatgagaagccactggaaggttttgagctgaggagtgacatgaacagatgaatgtttttagaaggagcaccctgcagccatgtggaaaagacactacggggagccagagtggaggcaggtggaagggacagtggctgggaacagggagattatgaagcacaggcaccaggactggggattggttgaggctggtgtgcagagtcccgtttggcatcggatatgtcttgtgctcccctttcgggcatgctcatcctgcctgcactgggactggagcccaagagcccagtgtctggagaacaagaacccagtgtgtgcaaaacgaacagccctgccctccaagatgctggagcttgttgggtcagggtcgttgtgttcagatctgaaatctcaagaagccatgaatttgttcatggtggataaagctcccccttgggagccctgcttacagtgattctgtatcagcccgttcccctaaattactcagaaagttttctgcactctgaagctccaagtgtgcacactcagcatttccccgggtaataaagtttcacaggcaggagtagcaccgatgaactgattatgcaaggggccgtgacaaactcgcagatcccaagaacagaaccagggcagcctttggactccttgtgaatttctgcagcatcagctcctgcatgctcagttcttgacaaatgtaagacgcggcagagtgtcatacagcccccacagtggcatctctcacttcatgctcaggagctgctcccagtgcttggccatcagtgatgatgatgccgaaccttaactgatgtggcctgggacctgggcctcactgtatcacgagaagagaggatggggctaagatagttgtctctcagcttcatcttcttccatcggcagctgcaacccagagcttcctccaacagcctgcccaaaggccagggattcccctttctgatttgtgagaagatatcttctagaatgttgggaatgcacatatttggaatatggtgtatgttctgtccatctcagcctagcactgaggttgaggaaataatcacatcctttcatgaagagtcacagtggacatttgcctagtaaaggctctgacaagtcttgtaataatagctattgataataactaaaagttttgtcaaatgctactttgtgccagacaccactttaaacatttctatacatattttccctttttatccaaaaaataaccctagggggtgggttctattatcccattttaaaggtgaggattttgagacacagagaggcaaagtaacttttcctagtccatacagctagtgagtgacacggctgaggtttgaatctagacagtttgatctctgtaccttccctccaaacagctacaaaaaaggaggggggaaggggtttaacttgtctaatccagtcgttgtcacacctgtttgaccaaggtactctttttcatgaaatacctcttgccatcccacagaagacacttccagtatattgatcagactctaagattgagtattcattgaagttactggaaagggaccccattgcaagaacagtacagtgaggtgacagatgttcaggataaatgggacagaggagaggagggagcagagagaagtattcaggatagcgcaatggattctgacttcagactcctgcacccaaagactagttgtaccacttgtttgctctatgaccttctgtaagttacttaacctctctgttaataaaatggcacacttcacaggattgttgtaaagaagaagggaaattgtgtatatcaaaggaagagtagaagaaagaggttcagtgctcactgctcagcatctaggttatcctcattttcttcttgaaatgtttgctttcctgtagttttgactctgtctgtaagtgaagaaattgtgaattaccatgttgacatgtttcagagttagtttaccaatatcaaaaaacactgtggagtacctgttgtatttcccagattgtggtgagccctgagtggggttccaagaaggagcaagcctggtctttgcccaccgagaacttaatggtaagatagccacatatgtaaaatgaaataaagctttgggctaagagtacagatgctggaactagacttcctgggttcctcttggtttctctactagctagctctgataatagctattaataattcctcaggtatagggagtatttgggcaagttccttaacctgtgttcccatttcctcacctgtgaaacggtctacttcataggagggtgtattcgtttgctagggctgccataacaaatgaccacaaacttggctttgaaacaacagaaatttattctctcacagttctggaggccagaagtgcaaattgaaggtactggcagggtttgttctttctggaggctctgagggagagtctgttccatgcctcattcctagcttctggggccgctggcaattcttggtgttccttggcttggttggggctgcatgattccagtttctgccttcaacttcgcatggcctttgcccttgtctgtttctgtgtcatctccttctctgtctctcataaagacactcatcattggatctaaagctctctctaattcagaatgagctcatcttgaaactcttaccttaattatatctgcaaagaccctttttccaaataaggtcacattctgaggttctgggtggacatacctttggagggacactactcaactcaatacagatggtgcaaggattaaaagtgttagaatgtgtaaaacacatcagatattaatgagaatagggtaagagctgccaggataattatggtgatgatattatgtttactcttgtttttgagttcaaagtaaatatgcatggtggtgatggttgttagtattattagtatcattatttagttcaaatcaggaatgaggacatgtcacaaggcaaatggtgttcctcattccaactctggacttttccccatgcccttctgggggttgatgctgggaaattaatcacagggaacagtgctgtctgtgaacgacaggccaaacagggtgatgtgagccactgaggttccttgatctgaagaattctacaagaattacacagcaacacagtcctgggtaatgttcagacttgtgggagtattgcaaaaagactagagtccgaagaggctacaggtggcaagactctcacggaggttttcttcctggcctgggcctggatgtggccatgagaatggacgtgaggttaagaggctggagaaacacagcacagtagaaattgaccatacttggttgcttgatgtggacagagaaaaaggagaatgttcaagacaaccccaagttttcaaacctggcagaccagatggccaggtaaacatccagcatctaggaattcatccaaagaaataattgcatcagtgaccaaagatcactggcccctcccctcatgaccctcactgtctgcctgaatggtattgtagcattgtttgtaatagcaaaaatggggagcaacctaaaggtacttcaatagaggtttggctaaataaactgtagtttatctctatagtgggatactatgtggctgttctttcacaaaggtgtgggagccaaggaaagatgcccacatgctgaagtatccatataacatgaagaaaagtacgtgtgtgtacaagcatagggagcagttttcaaagatctatgctgtgggtagacagcaaactatggccagtgggccaaatctgacctgctacctgtttttgtaaataaagtttgtctgggacacggccacattcattcattgacatattgtccatgacagcttttatctacttgtgtagctcacaaagcataaaatatttactatctggtccttgacagtaaaagtttgccagctcatggtctataccaaactgtaaaccatgtctagtagaatcctaataggtttaggggagaggaggggacattttgtctgccttgaatatttctatattatttttttttaaataatgaacatggatttttataatcagaaataaagttcattttggaagggggaaaaaggcgtgcaagacacactacctcatttcgagacttaactataaagctgtagttaacaacacccttattggcataaagatagttgtatagctcaatcatacaaaatagatagtctaagaatagactcagacttgtatggtcaattgattttcaacaaaggtgccaaggtaattcaataagagaggataggcttttcaacaaatggtgttagaaaaattggaaagctaaatggggagatgaaaagaaccttgacctttaccttgcaccataaacaaaaattaatttgctgtggatcatagacataaatgtagaagctaaagctataagacttcttctaaacaatgatttaggggaagattccttgaatcgaatatagaaaaacacaaaccattaagaaggaattgatgcaaatgactatataaaaatttgttttgaaacgttttcttcattgactagtcttaaaaaagaaaataccaaaaagctctttttaagacactgtaaagaaaatgaaaagataagccatagactaggagaaaatatttgcaaaacacatttgtgataaaatactatgtcacagaacatataaaatgctcttactatccaataataatgtcaaaccaatttaaaaatgggcaaaagatttgaataaacacttcattaaagaagataagctgtggcaaatcagtacatgaacagatgctcacatcattagtcattaggaaatgctaattaaaacctcaataagaggttttaagtggtatcaataagataccactaaatacctattaagatggctaaaattaaaaagactggtattactaagtgctggtgaggacacaggatgactgacagtttcatacattgctgctggtggggatgggaaatgctatagcaactttggagaacagtgggacaatttcttctaaagttaaacatatgcttcccatatgacccagaaatctctcagccctatgtatgcccaagaaatatgaaaatatatgttagcacaaagaccagcattcctgaaactgggaacagcccagtaccctccctcatctggggaatcaaattgtgatacatccatgcaactgaatactactcagggacaaaaaggaatgaaatattaacactcaaagaaacatggatgaatctcaaaagcagtgtgctgagtgaaagaagtcagatggaatagaatataaaaaacacaaaccattaagaaagaattgatgcaaaggactatgtaaaaatttgtttttacatactgtaggatactgcatactgtaggattccacttatatggctttccggaaaaaagtgaatctatttggacagaaaacagacccctggtttccagaggcttggaatgaggggagaagattgaccacaagaagcacaaaatacctttcgtggggatggaaagggtctatatcttgattgtggaagaggacatgtgactgtttcattttgtcagaattcatctaatggcacatttttaaagggcaaattttattatgcctaaggtgtacctcaataaatctaacttttaaaatatataatctggaggaagaacaaactgaaaaaaaatacttctaaaaaaattgcaaggtaggagtttttcaaagggatgaggaagagtcagtttgaagggcaatgaatattccagaacaggaattctggacttaggaggtcaggctgggccaggcacggtggctcacacctgtagtcccagcactttgggatgctgaggtgggtggatcacttgaggtcaggagttcaagactggcctggccatcatagtgaaaccccatctctactaagtatataaaattagccaggcatggtgggtgtcatgcgcttataatcccagttactcgtgaggctgaggcaggagaatcacttgaacccaggaggtggaggttgcagtgagccaagatcgtgcagtagccaagattgtgccactgcactccagcctgggagacagagtgagactccatctcaaaaaaaaaaaagaggtcaggctggaggcattggaagctgtcctcagggactcatgagtcagtaaggggtctccaagtgagcatgaaacagtgaggcctgaaccccaagaagcacctacagggagagaaggacaggaaacaataaaggaactgagccaggtgcagtggcacatgctgcaatcccagctactcagaggcttaggtggcaggatcgcttgagcctaagagttcaagaccagcctgggcagcatagcaagaccttatgtctaaaaataaaaataaagaaactgagatgcaccatcagcctgggcaagtcttaaaggaagaagacagagtgcttatttttttaatagataatacagaacaaatgctacaaagtaggaaggagtaaacaataaaaagtaaatctccctctccacaagcatctattccccttcctggaagctcccagtgttactggttatattgtgtctttccagatatattctatacattctctactgaactttgcttttttccccttatttatatatccttctcatggttccatatcagtatatgtagaggttccctaattttaaaaataggtacaagattgtacggatacaccataatttatttagccaggctgcaactgataaacatttggattgtttctgatatatcttgctgttatgaaccatgctttcatgaatgctcattttgtttgttggttttttagagacagggtctcgctctgtcactcaggctggagcatagtggcatggtcatagctcgctgcagcctcaaactcctgggttcaagagatcttccttcttagcctcctgagtagctgggactacaggcacatgccactacgcccagctaatttactaaattattacatttttattttttgcagagacagggtctccctatgttgcccaggctggtctcgagctcctggactcaagccatcccccctactttcacctcccaaagagctgggtttacagatatgagtcaccatgcctggccaatctcaaagaatatgcacatttttatattaatatatattattagctcctccaccaccctgggttggtactgacttaccctcccactagccatgcctgcatatataccaggcacgaatatacctgtttgcctgagacctggccagcagtatatgagctcaaactttgcttctgccaatctgataggcgaaaaatggtatccggtaggaaatttaatttgcatctggaggaggggatttttttggaagtgaaagaacaccaagtcacaagtgtcagctgcttgagtgcctttgctggtccagacagcacctctgagtgaattagttaaaggtactcctcctcaagacacttggctgccatctgctagaaggctgtcgtgataactaaacaaatatgtaatgactttgaggtgaagagcacccctggagttgtacaaaacacagcctgcttctccacaggcagctgtggagctactggcagtcttgatagaacagcagtttctaggtagtgaccagattgcctggaattagtacagtcgaagcggcacgtacaggacaagaattcaagatgcttgacagtggagcacaagggcattagcttgagggacagccagaataaatggaaacttcattatccatggattatgcacttggaacttaggtcctaggcaactctgatattagtaatttggccagcaggctcattaagctcttaagaaaagtgggcctagttaatgaattaacacaagatgacattttacacacagcaaaaacgagagcaggcaccactgagttatgcaacatcataatttctcaggcaaatgtgatcgctgcgtctcgcctgccaaagtgaagagaggtctgaagagagcctgctttcggagacataagtgagcccattaagttccacaggcattttatatcccatgcattttaaagggctcccacttgtattcttaaaacctcacgtgtttacacagaagtcagcgttttaaaatctctggaccatttgttttctgtgtgacagtttacccactttcctcctttaagaaatacatttcactggccaggagtggtgactcacgcctgtaatcccaacactttggaaggcagagatggatagattacttgagcccaggagttcaagaccagcctgggcaacatagggagactccgtctttacaaaatatgcaaacattagctaggttgtgtgacgcacccttgtagtcccagccactgagacgggaaggtggctcgagcccaggaggttgaagctgttgaaccaagatcgcgccactgcactccagcttgggcaacagagtgataccttgtctcaaaaaatacatattaaacattaaaaaggaataaaaaataaaaaaaatacatctcactggaatggaactcagtctgttcatatcttctccccagccccatcccccagaggtggctcccccagctttctacccccagttgcgagaagttggtgaggataatggtaagaacagcaacactaaaatctagtgttcattagtgagggatgatgaaaaattctggagctggatagtggtgatggatgcactataacatgtgtgaacgttaataatgtgtatgaatgttaagcgccactgaactgtgcactttaaaatggttacagtggtaaattttatgttatgtctattttatcattattatataattatatattatataattatataataataattattattttgttgtagtggtggttgttacaagaaagaactagcatgactgaggcaaacccttgccaggcactgtgctcagcacttgtgtatatgttatactctaccatctggatagtccagggagacacggatactgttgtttacccaggaccaccaccatttcacagacgaggagggtgaggcttctaagagttaagtgactcacttgagctcaaacagctagaagcagtggctccaggattcccccaaggctcctaactctacagctctccctgctagataataaaataaagaagttattttagtttaagccagaattctgaaacatacacatacacaagcctccacccagcttctaattgtctcactgagaacagacaaaactccagtagaatccttgaatgacagctaattgtctccagaaaaaatccaaaattgcctccctcccttaattgtagtgcagcatgattctgtttttctgctgggcccctatttgcttctttctgtgcaatgaatcattgaaagagtgaccaccacggacttggagaatctttgtagcttttagtctgtgtttgggtgtggctggagagacaaattaacacacagagccggaccttgaaggggaaggtcctcatttgtctcagattgggatcatttggggaatcagaaaatgtttatatcagaaaagaagagaagtcaatgtgtttcgcaggtttgtggttttttgaaggagaaacatctagattctagtcctgttcctctgcctccttcttaggtgatgttagacaaaataattcacctctctgagtcaatttgcttatctgaaaaatagcaataacaacagcactcattttactagggcatgtgaataaacagatttttttcccattgagtggcaggtatttattgagtgcctactatgtgccaggcaccatcctactctctggggatacagcagtgaacaaaacagacgcacacctagtgatgagggatggagtaaagcccttagccgatgccaggacagaggacatgagtcacctgtagtcgctgccactgctgctatttcatggctacattttgacccctgtggacccactgaaacctcctcactgcctcacaggcagaacaaggacagggtcttggccaccaagtttactcacttgagctgcatttagattattcttccagctaggccatgacagtaggtagtggcagctctctgtaaagatgaggggtccccagctcggacccctggtttcctccacctgcctggaccttacagtggtagccaggtgtgtcctgctgactgggaagctccttacctgggtgcttgaagtatggctccttagcatgtgtggagagaaggctattatgatagcaacctgcaggggtgggatgtgtaccagaccttcaccctggaactcccgaggaagtgcctgcagattgcctggcaggtcttattcgggtgatgtagagcagaacgctggggccaggttctgaagtcagacccctggactcaactcacgcacaactccttacctccaaactgtgtggccttggtcaggggaactgacttctctgagcttcattttcttcatcttaaaaaaaaaaggagaatcacaccacctaccccatggagttgttatgaggcagagagatgtgatataaagcatgtacttggccaggcacagtggctcacgcctgtaatcccagcactttgggaggccgaggcagttggatcacttgaggtcaagagttcgagaccagcctggccaacatggttgaaaccccatctctaaaacactaaaagtagctgagcatggtggcacacacctgtagtcccagctacttgggaggctgaggtgagagaattgcttgaacccaggaggcggaggttgagtgcaccgagattgtgccactgcactccagcctgggtgacagagcgagaccctgtctcaaataaataaataaataaataaataaataatgaatcatgtacttgtatgtaccgaacacatgcacttacagagcataacgtatagctatgttcaggggcctgatgagtattgactcatttcaggctcacagaagccccaagaactgggcactattacatctccattttgcagcccagagagggtaacacttccaaagggcacacagcaagcaagttttgaggggctgggatttgagcccaggagttcctgctgttagcctgggctgtgctggctctccatcccaaaagctccatgtgaagcctggcttgaaataaatgatttgcaggtatgaggaccccagaggtactacctgtgttcctgaggtgtgttatacatttctactaaagaacggatttctgctacaagaactctcactcctgttccctggatagcatatgatactttttaaaacaacttaattgagatattatttgcagtacttaaaatttgcccattttaagtttacagttcagtgattttgcgggggggaaatttaccaatttgtgcaaccatcaccataaaccagtttcgggacattcccgtcaccccaacaagattcctcatacccattgactgttaatccccattctctttcccactccaggcaaccactaatctactttctgtctctgtaaaattgcctttcctggaaattttgtatatacagaatcttacaatatgtgatcttttgtgtctggcttagttcactgcatcatgtttttgaggtccatccatgcagtagcatgtatcagtatttattaactttttatggctgaataatattcctttgggtggatgtaccacgttttgtttatccgttcatcggttggtggacatttgggcggtttccactttttggctattgtgaatagggctactgtgaacattcgcatgcaagttctggggctgatgttgaaacacaaagattagccaaactggtaaccttctctcttttctctcctctcttgggtttctcagaacccggcagtgggcaggtgtttgtgacttcagagaaccaacttgtgtattaccccagcatcacctatgccatcatcggcagctccgtcatttttgtgctggtggtggccctgctggcactggtcttgcaccaccagcggaagcggaacaacctcatgacgctgcccgtgcaccggctgcagcaccctgtgctgctgtcccgcctggtggtcctggaccacccccaccactgcaacgtcacctacaacgtcaataatggcatccagtatgtggccagccaggcggagcagaatgcgtcggaagtaggctccccaccctcctactccgaggccttgctggaccagaggtgtgtgctggatggaagagattgaggcgggagaggtcatccattgcggggaggggaataggtgcacacactgaggttcttaggtcttgccaagagcctggcttcagctgctataggcagtggcagcatctgacatttgccgagtcctcgcaaaattctctacatgtatcacctcatttaatcctcttagcacctcgctgagggaggaaactgataggaatgttccaaaactggattatggtgatagttgcacaaatcaggaaatttccaaattctacagatgaggaaactgaggctctgggatgttaaatgacttgtctgaggaacatacagttaggatcctggcctgctcctcctgggaatgtcacgctggtccatgttctggccacagactagctctgagcctcacctgctactgcagagcagtgcccagtacatgtgagaggtttggttaatatctgtcaaatgaatggataaatgaagaagtgaatgaatgagagaatcagtgagttccttaactttgcttggcttcatctataaaataaaggaggtggaaaggagcactttcaagcttttttaagcagtaccacattgcaaatggaattgtacaagaactcccagtatgtataaagccaggaagcagagttctgtagttgaagcaagcagtgggcccgtttcctgatcagcatccctcttcctcaagctctgccgtgtatggcattagacattttgctggccgtgttctgatggtgactgggctcttccttggaccctcttccatggcagctcttacattattgaatcttcgttttccttcctcatagaaggtgaataaagtttcagaggtcaggggagaggatggcgcttaaggatctctttgcaaataagtgtaagaattcaggaccttcctcacctaataaagttcccactcataacctcttcatttggaccacccagcatagggtaaggttaaaattgctgaatctggaaacagaatgcgtgggttcaaatcccagcattgctgtttaccagttatttctgatgctgggccagacattgaatgtccctgtgcctcagtttcctcaccagagcaacaggcatgaaagtaatgcccacctcccagcattcttgtgagcattaaataaggtaaggaatgtaaggggcatggcaaagtgcctggctcatgagaagccttcagtaaatgagagctagaaaataaaatgtcttttctgttaaattcattccttttaagccccttctgccgatacagaccgaggtgttgagaggatgtcctctcaccccagttcatagccaggaagagttggctttcaatagaaatgccaattccatgttcccatcagaggcccagtcaagataccagcccagcctcttggccacagggcttttggctgatggagcagagtggcaatgccaaaccacccaggttgagccgagggacttggtgggcgacctcattctggttctacccagaggatgtggttttggcaccgtccggtcaacaccaaccagccagaacacactggccttttctgttccgatgtggttcctggtccttgaattaattgtctttgtacttggagggaaaaatctcatttcgcactggaaacactgtctcagaaatgggctgaagttggcttatcttggccctaatgtgttctcttctcttcctgtctccattgcccctgcccccctgctgtccccatcacaggcctgcgtggtatgaccttcctccaccgccctactcttctgacacggaatctctgaaccaagccgacctgcccccctaccgctcccggtccgggagtgccaacagtgccagctcccaggcagccagcagcctcctgagcgtggaagacaccagccacagcccggggcagcctggcccccaggagggcactgctgagcccagggactctgagcccagccagggcactgaagaagtataagtcccagttattccaaagtccatatgggttaatctgctctgacttgttgccattctaacaatttgtgctcatgggaagctctttaagcacctgtaagggtgtctcaagttacagtttgggatattaactatctctgcattcccctcctcccccagacttcagagatgtttttctggcgtctcagttgacatgatctgttgtgcgtcttttctgtcaggtcactcttcccttgggacccgagatcacaccctcatttttcacattattctgtttctgttggagagacagcatataaaacagtattgaaataggctgggagagagcaatgtttctgtgctatattggatgctcagaagtgcaggagacgctggacccaattctctctgctgggtagttaccttatagcatttggggatttgggttagatgatctaaccaggaggccatcactggatggtcacccccccaaaaaaattccatttgagcatcaaaacctgctttgcacaatcctatttgatgcccccagttcagcagagtcagtggccaaagaaaactttggacgtgagtaacacccttcagcagtcgcaacgttattttggttttgtgaaggactctgaaaccatctaccctgtataaattctggctttagaaatttgcccaagaatgctcattctgagagctttcctcagcagcatatatcatcagcctcatcctaaaataggcagggagcccctcccatgagtttatccaagttctcagctcctaaaatgcaggctgccaagaccctacacctgccctggctctacagccacttacctggtttctggactgtcaccctcccagctgacctgcccgtagccaaggaatgaggacctaacttgagttggcccaaagtctgacctggctgtatgtccctgtggcccacacccagcctgtcttgctcattcatgcagcctcaacactggcctccaaagttcccttaacacttgcaaagtcctttttacctgtgcatttggacttgaggacactggtttctatcacaggtgagagccatgttcaatacctccagcaagctctcctggctccctgcactgtgcacgctcctcttcccaaggtcccaataccagcacctctagttagagttagggtcagggtcaggcctctcccaacatcccagtagtttctcctctgagacacatgggcaagagacaatttggagtcaagattttccatttggatctattttaaatcttttagaaatgcatttgaaacagtgtgtttgttttttcccttctagttaagggactatttatatgtgtataggaaagctgtctctttttttgtttttcctttaacaaggtccaaagaaagatgcaaaaggagatcacacccttgccccgctgagccccgtgataacaagtcactccagactaacctgtgtgccagacatttgtgcattgttgcactttgaggttattatttatcaagttcttgaaggaagcagaaagagggactcctctctccctccgtgtatagtctctatgtttgtgctagtttttcttttttttctctgtgtccagtcagccacagggcccgcctccctgcaggaataaggggtaaaacgttaggtgttgtttggcaagaaaccacactgactgatgaggggtaaaatggaaccaggtagagccactccgggcagctgtcacccattcagaacttctttccgcagctgaagaaatgttcagtaacctgtttgacgctaattaaaacagagcctgcaggaagtggggctaaagtggcattcagtgatcctgttctgtagacttttctttctttttttaaccaaatccaaaggatgttacagaaaagctagccactggtattttgttttgtttaaaaaaaaaaagaaagaaagaaagaaagaaaaacggaaaggaacctagctgcctgtatctttcatttttaaaatagcacttgagttattttctgagtaatccaataaagaacttttgatgacagccagaatgtgttagaactctggctgaacatttcatctcctgtgagtcagaagggctttatttctccctttgatggggccccttcttctttctggtgctctggaagttgtttagaggaaagaattctaattttaattaattgcgcagtgagttaatctcactcgcttttctgcttccaggcatcttaggaaaaacaaatggttttagtagataagggatgcctactaatgcttttttaaaacaaacagggacatttttattatagatttgatttttttaatgaatgtttttaaaaatatataaataggacaccaaagcggcagggtttttttgggggggagggggtttgttttccaactcaagatggcacattagtggccagcaatattttttaactcattccaaccaggaagcttttttatacattgcctaaatctacgccaaccagaaaatagtctcatctctttttttctcaaatgagatccgtgttttattttagcattaaattagttacactgtgatgactggcctattacctgactcagctccctctaccttgaaattgacatttttaaaaaatgcaactaagtggttaatagtgtgtgacgctcaaagttaatgtaaactggaaaggttgtgtgtcgttgctttttgtgttttggttaggcttggttttgttttttaatttttatactttctaataaatttgcagtttcattctttctgtttgtgcaaatggtccttgacccactcatttcccttatagcaatataaacagtggacagtcacttctgtcatagcttttgcaatgaatttatgccataataaaatgagaaaaaggaagaatatgttggtgggacctcaaaatgtgatggatgcttcaggattctgcagctgatatgattggaatacagaggcaaagttgtggacaccagttaatgtaatgggccctgggaaatcatattggaagatgggtgtttctgcctttgctacagcattgttcaagggaaaaggacaagtagctgtgataactgtaacagattctgaccacatattcaggagcacactatagctcttgcataggtgggctagtaattagtttcaaaacacaaatggctcagattgtccccatcaatgatgggaacatctttatgcttttttaagtctagttttggagccacatgttggccaatgcagcagggacatctgcctgggaaggaagttaggatgccccataggtcaccagcaccaccatcatgaacagggacagtaactccagccctggccgaaatgaaatccacatggaaatccaaatgcaagacccacagtaccaagatttggatcatgtattgatcccagattcctcaaatgaagactgggctgtcaggcatgtgtatcccaaatatatgctatgtcatgccctgccccaagtgatgtagagtagactttcccaagccccaaagatttgtcaagttactcatttcatcatccctcgaggtaccttatgaatacctttttttttcttttttttgagatgaagtctcgctctgtcgcccaggctggagtgcagtggcgtgatctcagctcactgcaagctccgcctcccgggttcacgccattcttctgcctcagcttcccgagtagctgggactacaggcacccaccaccatgcccggctaattttttttttttttttttttttttgcatttttagtagaggcaggatttcaccgtgttagccagatggtcttgacctcctgacctcgtgatccgcccacctcggcctcccaaagtgctgggattacaggcgtgagctgccacgcccagccatgaataccatttttatggatgccaagatgagcattttttatggatgctagtgctttgcaatgattgtaaaatactcagctagagcaggggttgataaactttctctaaagggccagagaataaatatttttggcttgtggccgtgtggtttctgtagcaactgcaaaagcagctatagacaatacaaaattgaatggatgtggctgtgttccaagaaaactatttacaaaaacaggctactggtgggatttgacctgtgggctgtggtttgtcagtaatctaaaggatcacttccacattgggttcatagatgtaaagctaaggacactgaagagaagaaacagttgtgttaatggcttggagtactagaacccttgaaatgacaccaatctcaaaaaattaaaaataggccgggtgtggtggctcacgcctgtaatcccagcactttgggaggccaaggtgggcggatcatgaggccaggagattgagaccttcctggctaacatggtgaaaccccatctctactaaaaatacaaaaaaaaagaaaaattagccgggcgtggtggtgggcacctgtagtcccagctacttgggaggctgaggcaggagaatggcatgaacctgggaggcagagcttgcagtgagccaagatcgagccactgcactctagcctgggtgacagagcgagactccgtctcaaaaaagaaaaaaaattaaaaatagaaaaactcatgaagcagacaattcaaggcccctattagttctcttccaaaataagaagatacaggattaagctgaagagaggctttcttaatgaaatcctaaatatttgggttcaatatagcaatcctaggaaaaaaaaaaaacaaaaaactactcttactgggagttcttcaaggtcatgaactcacacagcaatctgtctttttttttttttttttgagacagagtctcactctgttgcccaggctggagtgcagtggcacaatctcggctcactgcaacctctgcctcccaggttcaagtgattctcctgcctcagcctcccaagtagctgagataataggcgtgtaccaccacacctagctaattttttgtatttttagtagagacgggattacaccgtgttagccaggacggtctcgatctcctgacctcatgatccacccgcctcagcctcccaaagtgctgggattacaggaatctgtcttttagagaaggtccatgggagtgagtgacgtggtatgtccattttctacattgagcttgcaacccacaggcaaagcagtagattctaagagtgaattgaatgagaaagagattcaggtggctgcagtggaagtgtatgagtgtacataactatgcacccagtgagacccttagggaaaaggtcagtgagaaaatatactgactcccttgacatcctacagctaaacaagttcataggacattaattagaactcctagttgtaagttatagaaatctgactcatacatgattaattgcattaaattttagaagatatattgtctaaagcaaccaagtccaagattatggaacttttgggttcaagcagacctggatccagctgctcaacagccttcattaggaatttgttcctcccttgccagtttctcagccctgcttgctcatggaaaagagagtccagaaaacccaggttcacagtctcaggagaggcactctctcctagcatctatagaaacctttaaacggactcacgattggttgttcttggtcatgtgaccactactatgagtgggtctcagtcccttgattgacagccccacctgaattacatgaagtgggaaagggaaaattcccatatggaaagagtctggtagtagaccaaataccaatatatctgctgtaaaccctcaccaaagaatgggactcacaactggctggtacaatttgtaatatacataagaaaatagcagacaactacaagcttcagacaatgtaaccatgggcattatatggtctgaaagaaacagaggcaacgttgcagtgaaaatttcaggagactcaacagcctttccttaaacctatgaggcaaggttagtttcaagttggggttggatcatgtatacttttgtgagacggtcatgaataagctgtgtaggaggaattctaccctaaagataccccaaatatctcttgggctcagaactgtctcccaaccactgaaatggggcaattatcctgccaagagtttccccatccttcacagtatttttaagctgatggatcagaaatatattcccattcatcacccttatcaagctacctaaagacctagactcaagtatgcatgcagttaatgaggctttccatagttaaccatttgtctatacctgaaagttaggatgtgtcaatatctagagaaccatccactagaaattttggaacagcttgtgtcactggagctgaggggctgagtttccattatattgagagcttgaaggcataatcatggggagctgtgatgaaatattggaggaagcatgttaatttaaatattactgatgcctcagttgggctgagtttatagtctgagcaaggataattcactctaaagttctaatatcaggctgtatttgactttacatgcttttcaaggtcaccgttgacggtgagtcatcccagtgagccagcagagaaaaggcattccaaggagcacacatgcatgggcagtgtttacgggccagacctggaagcaacacacaccttcactcacatttcattgcacagagcctggtcagtcccatggtcagacctacctgtaagagaggctgagaagttagattagctgtgtgtccaggaagaaccagaaatggattttggtgctggtgaccaaacctgtgtttgcactcttctttcccttctgaaagaagacacccaaccattccatctaatcagatccaagatctgggatctggtgaaaatttctgtcaggtccaaatttggcttttctagaatgacaacttttcaaccccacacagctcatatcatctctcccctagattgcctccctttggcctattttcagaatctctttcttttcttttctttatttatttatttatttatttattgacagggtctcattctgtcacccaggctggagtgcagtggcatgatctctgctcgctgcagcctcaacctcccgggctcaagtgaacttcccacctcagcctcccgagtatctgggactgcaggcatgggctaacatgcccagctaatttttgtgttttttgtagagatggggttttgccatgttgcccaggctggcctcaaactcctgagctcaagcgatccgcccacctttacctcccaaaatgccatgattccaggcacacaccagcactcccagcctattctcagaatctttgaataacttttccaggcacacaccaccgctcacagcctattctcagattctttgaataattgtcaactcactgcggagaaagatcaaaatgctagtctatgggactttccaccacctggcttctcccttctcccttaccctgctccagctatcctgaccaccctcctggttcgaacctaccaggcagactctcagctcccaaactttgttcttgctgttccctttactggaacagcttctcaagatccctagaatactcttccccatcagagaaccatcaggagccacagccacttggaatattgctattgatgtctttgggacctcagctgtggccacactgagattcgtggaagatggaagtaccagactccttcttgaccaagatactgattgatccctagactaaagcagtacatgagaacttgggaaggtgagttgaaataccttgaaataataaacaatacactggaatgtgaagaatgggactaagtgatggaggtggtacctgaacacatgcccacctgggggcctgctcttttggtgacccctcaataggtatgactcttttgcaagaggacttgggccagaccatcttggaagtgtgttcttggtgtgctagtctgtgaatcaactaagagcacaccgacatgccaggcaacttcccagggata

SEQ ID NO: 3334 - DNA, 727 bp, Homo sapiens
cgggcagcgggagcggcggccgcgccatgtggctgctggggccgctgtgcctgctgctgagcagcgccgcggagagccagctgctccccgggaacaacttcaccaatgagtgcaacataccaggcaacttcatgtgcagcaatggacggtgcatcccgggcgcctggcagtgtgacgggctgcctgactgcttcgacaagagtgatgagaaggagtgccccaaggctaagtcgaaatgtggcccaaccttcttcccctgtgccagcggcatccattgcatcattggtcgcttccggtgcaatgggtttgaggactgtcccgatggcagcgatgaagagaactgcacagcaaaccctctgctttgctccaccgcccgctaccactgcaagaacggcctctgtattgacaagagcttcatctgcgatggacagaataactgtcaagacaacagtgatgaggaaagctgtgaaagttctcaagaacccggcagtgggcaggtgtttgtgacttcagagaaccaacttgtgtattaccccagcatcacctatgccatcatcggcagctccgtcatttttgtgctggtggtggccctgctggcactggtcttgcaccaccagcggaagcggaacaacctcatgacgctgcccgtgcaccggctgcagcaccctgtgctgctgtcccgcctggtggtcctggaccacccccaccactgcaacgtcacctacaa

SEQ ID NO: 3335 - protein, 232 aa, Homo sapiens
  VARIANT (1)...(232): Xaa = Any Amino Acid
MWLLGPLCLLLSSAAESQLLPGNNFTNECNIPGNFMCSNGRCIPGAWQCDGLPDCFDKSDEKECPKAKSKCGPTFFPCASGIHCIIGRFRCNGFEDCPDGSDEENCTANPLLCSTARYHCKNGLCIDKSFICDGQNNCQDNSDEESCESSQEPGSGQVFVTSENQLVYYPSITYAIIGSSVIFVLVVLALVLHHQRKRNNLMTLPVHRLQHPVLLSRLVVLDHPHHCNVTYX

SEQ ID NO: 3336 - DNA, 51254 bp, Mus musculus
  misc_feature (1)...(51254): n = A, C, G, or T/U
gatgggattagctaatctcaacattctctgcaggaagcactcttcagaccataaacatcatggggaaggggagatgatagttatggtggacattttttttctacaaacactatcaatatatgcaaacggaccagaagaaggctttgccatccctctgagcatcaccctgggagcagggatggagaggaaggctttgccattttcccatggatctgaggctatgttccttgacaagcttttgtccatgtcaacagcacacattcactaaaggcttcctctcatccccacactggaagatgacaaaagtagaaggagagagaccagtgaagaagctacagttgtctaggcaacaaatggggcttagattacaatgatgagtgtaaagacagagagacatttgtatccaagagctattgtggaggaggtgccctgtaaaagaataaaaaaaaaaaaacaaccttgatttgccttcctgctgccctcctaaaatctaccatgaatgcggagaccaaaaaccagaggtacagatgtcatttgttcctttcatttttccctcaacttaataattaggtcatctttgcttctatcatatttccaacatcttcctcaaactgatacagctttgtcttcctgtaacaatctctcacatcctagcagcctcctacttgctctctcttttggaaacaaccatcggccgtgctagtggagacaaggaagcaactgagtttatgattctgaagctcacaagtgagatgacccagagctataagctaggaattgaacatatgtgagtatgaaaagctgtagaactggatgaaatcacatatgcagtgtcagcgtacagaaaaagatcgcagtgccatgccatgtgacaccttcctcttaggcaggaatccagtcaaaaaaagcagatgttccggcaggccatccaatatactctggatttccagttttctcagtcttttcacggatccaataaactatcctttcctaaaaactacatcccagacattgtcttactcttgttttctcagctgtgtggtttctgggtatttgtgtgtgtatatgcacacaacttgacctcaaatatatccattcctatagcctcaatcattgattctaaactggtaacttccaagtggctagcttactaaggcattcttgtgaatatgtagcttcttgaaccttttggacgtttacggtccaagaatcaactctcttggtgaatcttttttttttcttaactcaaattatttatttttatcttggtaaatcttaagcaatatcttgtacaaatgtccaataactctcaattattatttcattttatttttgctttttccgatcattctatttttttttaattattactattattgtgtgggggcagatatgtacatgtgccacagcatgaatgtggaagtcaaagtgcatatttgtagagttggttatctccttccacatcttcattggttctaatgatcaaatcaaggtaccaagcttatgcaggaagcagctctgagccatcttgctagccctatcatttcatgctgcttacttgttaagtgactttagaccttgctgaaaggttactaaaacaaccttgtatcttttaaaaaggcaatttagtttaaagaaatcagcaactgtaactagaaaagcactctaatgagaacaaagcctttactagatcttgtagctgtcctatatttgttattttgtttccacaagacccaacagagatttgagatacaaattaagcaaacagtggtggggtgctgaagactcaaactgagcaatcttggcttaaccacaagagttttaaatagggagaatgaaatgggaaagggcagatggaaaaactacaggaagtaggatgaactctggggtcaagcaaaaagggctcaagccaaaaaataaaggcttcacagtcatcggtctgtatccacttacaccaccctatcttgaatctaagttcttcatcttttatattatctataggctgaattccctgaggctacatgacaccactccttgcttctctgtaaagtttaaaaagccttgcccaaagaaatatattattctttgaaggcatgtttgttacagattcctgctcaatttctataccatttttccaattccaaagtaatggatgttttatggttttattaatggggttttacagtgctagtgggaaagaattaacatagcaacgttttaaataaacattactcatctttggcaataggaaactacaactattctgactataacgcactagattacaaacaaacaaaaaaaagcacatgattctatctatgaatctttttttctatttttgtttttagatggagtttcactgtctagtccggggtttgcctggaactcctgaaagtaaatgatctctctatcttaacctatagctcagaagaagagcccttgcctagcatgcataaggcctggagttttctccctagcactaaaaaaaccaaaaccaaaaccaaccaaccaaacaaacaaacaaaccggtttatctacttggaaacattttctagctgttttcatctaagctacattaccagtggtgaagtgagtttcaactgctttttgggatggaggaggaagactgccaagtgctgatctagtgcatatagtcttattccaactctgtccctgatggttttttatcttacagacattctctctagtctccgtggttgacttatttctgagtcattctcttgtctcataaaataatgttctagagtctgctagggtaaagtaagccaagaatgagtttattaaaactacaaacaacttcactaacaggtatgtgtatattgtatatgtgtttgcgtgggtgcgggtatgtttcccacacttttccatatgcagctatagacaaactgataaaacatgttgtgatcaatagtgagtacttcctaaggacctccctcccttctagttatctgaagggaccacatcagaacatttgtgaacattaccccacctttcagcctaatctgttcgtattctccacgcagccagactgttgactcaattttattctacctctcctttctcagcccttcaaaaatctaatagccaagtatagattccagtattctctcgtttgaaatgtcccttctcatatataaaaggcatgacaaatgacaaatttccctcactgggggccagatcgaaggttctcaagacgctgcaataatggatatctggccatgccttgccagccgcaacactcactgccactatcaagtccacccgacaatgctatatcacaccaggtgctggtcccggtcccgatgcctatcaacaagaggggtcagcaatgcgtctaccgaaaaatggccttctccaacctcatctcagctcctacatcaaacccacctaaatgtgcacgagttctttctacttcaaaatagagacatgcgtgtctgagcacgttgagacttaatagatgacagtcattaaactccgtagacctggctggcaggaatgtgtgtaggagacgactaactttatcgggggagggagggtcgatccttcaatcctaggactccccttccccagtgccgccatagaaagcggagccccaaaccctcccaggcgcggtgggaagctgttggtggagaggacaaaaggcgctagcagatgaagactcaccgatgccggccgctgcggggccaggggaggctccgggctgacgtccatcctctcggcgccgtccatctcttcgtccgccatcttaagggaaacgaacgcccgcagttcccgacccccggccgccagctagcggaaacctgtggccggcccgacgcgacagggacgacacttttacgacggcccctgaagtcaggtttgtcgcagcacccggagcggcttccggtcggcttcccggaagcaggctgccgacctgccaagccggaggtttccgcccctgatggttagttagccctgctccaccagggctgatccccgagggaagacctcacagctttgtcgccatcccttaaccccggggcaggggtggtgagatgacaaaaccgagaaacctagtccatcggtcggtaagggaagacaaactgaatacatccccgttatggaataccccatgaaaagaacaaggtagatgtacggaaacatcgaggggaaactgttgccacagactacaaattcctgcatttgtgcatctatgcatagtgcgaaggaatagctctgaaccaagagaaaacacccaaggccaagaccagggttggaggacaaaggtgataaagagctaatttagtgtcctctgtttttgtttttgttttttgtttagtttggtttagtttttacgaaacgaataatagcctccaataccacgcattcctcctacctctgcattccaagtgacagatgtcagccacctggtccctttttaaatttatatatatactttagcgacttgtgtctgtgtctctctctctctctctctgtgtgtgtgtgtgtgtgtgtgtgttgatcatgtttagagatcaaaggacaatttgagaggattggttttctaccatctcacctgccatggaagtgggttttgttttgtttttgtttttgtttttgtttttgttttgttttttgtttgtttgtttgtttgtttgtttgtttttgagacagggtttctctgtatagccctggctgtcctggaactcactttgtagaccaggctggcctcgaactttgaaatccgcctgcctctgcctcccaagtgctggggttaaaaaggtgtgcgccaccaccgcctggcttttttttttttttttttttttttagatctgtaaggtcaaattttcttcacatacaccaaccaaagcaacacatgactgactatagatagaggcagaactaaaacacacctaccttctattaaattggaacttaagaaatttggaaattctcacattttggataacatttgtttaccgagttaattttcattttaaatgctgtttatgcctggtgtaatggcacccacctttaagcactccagaaccagaggcaggtggatctctgaattcaaggctagcctagtctactccagagctacgtggtgagaccccatctcaaaaagagaaaaagaaaggaaaaatgtttaagatgttatattgtttacatgcttgtaagccggcatgggtgacttacagctgtaacgtcagctagcatttgagaatatgagggttcttccaagttggaggcagcagaactatatagttccagatcagtctagctgccggtgaggtcctgtcccaaaacaacaaaaagcagaacatgttgggttacatgaagccctgcatagaaacttttaagctagttaaaagttttctccatcttaaattgtaattagtaaatattgataggaaccatatgtacaaaagattcttggggagggggcaataattttaaggagtttaaagtgatcctgagaaaataaagtttgagaaacgctgttgttgttttgttctttctatcttgagaagacacattgttgggtgaaaaatcaagtgactgttttttgaggggagagcatgaggcataaggctgagcttgtgactcattgtaaagggcttatcacacacacacacacaaaccaataataataaaaaacgcacctgtagggcgctcgcaagatggctcagtggttaagagcaccgattgctcttccgaaggtcccgagttcaaatcccagcaaccatatggtggctcacaaccatccgtaacaaaatctgatgccttcttctggaagatctgaggacagctacagggtacttacatatagtaaataaacaaatcttttaaaaaaagaaaaacaaaacaaacaaacaaaaagattatattaaaaaaaaataaatgcacctgtagactaggattatagttcaaaggtagagagattgtgactagcatgcacattatcctggtcttaatcctcagtggttaaaaaataaagcagctatttttatattaaacatgtttaatgaagaatgctaatcattaaaatcttattcttgtggtaatgagaaaattttaacgaccaatgctattcaatgctagtcacggtcttaggtttactgtcactgtgatgcaacaccatgacctaagcagcttcgggaggaaagggcttggtttacacttccacatcactgttcattagccaaggaagtcagcgcaggaactcaaacaggacaggaacctgaaggtaggagctgatgcacaggccatggaggggcgctgcttgcttactatggcttgttcattgtgacttgttcagccagctttcctatagaaccagaaccaccagcccaggggtggccccgcccacaatgggctgggccctgctccatcaatcactaattaagaaaataccctatgggagggaccaggtagagggaagagcaaagatctggatgtaaagtgagtaaataaataaataggaaaaagaaaagaaaatgacctatgtgcttacagcccagtcttgtagaggcatttttctcaattgaggttccctcttctctgccggctataggttttgtcaagttgacacaaaactagccagcaccatcactaagatattttaaattttgtctccagactcatacagaaacgcccacagctcgaacctgccgctttgctcttccgaagccatcacgtgttcacctgcaaccttactcctaggttatttggcgggaatcgggcccctccccctccttcataacggagtgtcggaatagtaaaattgaaccttgagcagagccttgtcttggttccgtctttatctcgcgccgcctagtccctcttctcttccaggtttccaaaatgcctttccaggctagaacccagacctgtgatctgctggccagacacaacataaatgtctattttttatttttaattttgtttatattttgtgtgtatgggtatcttgcctctatgtatgtctttgtaccacttgtgtacagtacccaaaagcccagaagagaggaatggattccctgaaactggtcctgggaattgaagccaagtcctctggaagagtagtgaatgctcttaactgctgagccatgtctctagcccagagaaaggatatttttaaaggatctgcccatctttaaaggaaagcatttttaatatcttcctgttttcctaaccagatgtgattgggcccttccttcctgttggaggactgatttaataataattaaataatagaggctatatacttctagaagcaaatttgttcattgggattcagtacattttatttttgctacttggttttaaatttaggagcattaaacttactggacttcctcatctataaaacagatgcctatataaagtttgtaaagatgaatgaggcaccaccaaaagcccagaatgcctggtttccaatagtacagtgtttggtaatagctaagtgaactcccttctcaccccatggttttcttctatacaaaagcactttcatttagggggaagggagtcagggatcagcatacacagtctttccattgtgaatgcctcattaggcatcagcatccccaaccacgggcctagagtttattactgtttggtatcctcaggtaacaatgcccatccagacttgcagagttctttttcgctatggattcttgtgcttattgcctctattctaatgcaaggaataaaggcacagcacatcatgcctggctttttaaaataactgctgaattttagttgagattgctataatactttttaacagtggggtgctcggttgtttgtttttgttttgtttgttttagtcagggtctcactatgtagcctacatggcctggaacttgctagctctcttctacagtgctttgactaaaggtgtgtgccaccacacccagttaagtatctatgctttctatatatctcatgaatagattattcatccctagctatgatgtgattttctttcataatattcttcaaaaacttgtgtttgaccttttaatttctattcaaaaaacaaaaaaaaattgttatatattttaaacactttgtggaatggcatgaataattttgtccatgaaataaaacttcatagaattttctacttcttgtgttatgtagcccaggctggacttgaactcctgacctttatgtctctaaggtgcaattcaaatcatatctcaaacttgcaagttgggattatagctgtatggcaccactttttaaaaatcatttattattttatgtaagtacactgtagctatcttcagacacagcagaagagggtgtcagatctcattatggatggttatgagccaccatgtggtttctgggatttgaactcaggaccttcaggaaagcagtcagtgctcttaactgctgagccacctctccacccatggcaccacttttatctcaagaaactttcttatatatattgctgtgagactctcttatctatgtatactacgtatattgtatgaaatttaatttgcatgccacacaaatctcttctgaaatctaccctgaaatgtttttgccagtctaacctccattgttatctctgaccttaaagtttattcacatttcccacaaacatactatatagtcttacacttctatgctcttgcattggtctgtccttggccttaagtgtgtcatactataaatcttaggaagtttattagcctgttattaacacacttttaccccatacatttttcttcaaatttactttagttattgtatgatattctgttgtgtgtgtcattttaaagatttttaaaattttgttttatttgagacagaatctcattaagtagccttgactggcctctaactcagagatcatcccgtctctgtctccatgtgctgaattaaaggcttgagccactaagcttggcttattttaaaggtttgtattgtgaattgtttctagtatctttattttccttttacagttaaattttttttgacatcttatttttaagggctgaagaagtgcctcagtggttaagagtacttgtggctcttacagaggattgagattccgctctcagcacttacatagtccttcacaacagtctgcaactccagtgtgaagggattcagtgccctcttctgtcctccatgggcaattcacacacatggtacacagacatacatgcaggcaagatactcatacccatatgataacaataaagattctaaaaaatattttgtaggggctggagagatggctcagcagttaagagccctgannnnnnnnnnnnnnnnnnnnnnnnnnnnnnnnnnnnnnnnnnnnnnnnnnnnnnnnnnnnnnnnnnnnnnnnnnnnttaagagccctgactgcccctccagagatcctgagttcaattcccataaccacatggtggctcacaaccatctgtaatgggatcggatgccctcttctggtgagtctgaagagggtgactgtgtactcacatacataaaatcaacatgtaaatctttttaaaaattgtaattaattttttggggggatagggtctctctacatagtcccagctgtcctgaaactcattatgtagaccaagctggcctcgaactcacagaaatcttcctgcgtttgtttcccaaatgctggcattaaaagtgtgtgccatcacacccacctaaaaatattttatttttgtactaattatatgtgtgtctgaaagtgggtttatgcaacccagtgcattctctatagagaacagaagggggcgttgtattccctggcgcttgtggtcagaagccttctaatgtaggtgctgggaaccacactggaaatgctcccttatgttttctgtttgcatcaatggcttattacagtccagagatgttgaactgattgaaaaattacaacactgacaatatatcccaaggaaatattgtttaaagcacgatttgtataaaaatgtttattcttaatagcaacacatattaaagagttgaaagccaacaataaagaagtaggtttgataaattaaggccacgactagactctaattctgcttcaggcaatagaaaaagttaatttacaagtatactacagtgccacaataccataacaagtacatataaaatcagattaaggaaaaagataatttccacaagataaggaatcctgtggggttatgttattcgtgaaggagccagagtgagccgcccgtcgcatttgtactttaagaggcgtcctgatactcactttgattctcacaagcaccccgcacgcacgcaaggtgtcattaacttcgctttacaggtgctgaggtcgcaccacggtcagggatgccagaccctggaggagccaggtggcgagctgcctccctgccaccccctcgcttggctcttcctggtcctcactaggttgtcaaacgccgggcaaccgggctgccgcggcgcggaggcctgggctgaggcgagttgcggaggcggccggaggccacagaggccggaagtgcgggccggagcgctccggggctgcgccgagatggcgagaatgctggcggtccgggtggtggcagggctggcggcggccgcggtggccgccctgctgttggagcactacggcctggctgggccgaccacgccgctgccgaagcccagaggctcccagaggccgcaccccgccccgggctcggaagccaacaacatcttctgggggctgcaggtgaagtggcgggaggccaggggagggcacagcgcggggcgggctcgcccagcagggggcctcggtcgcagtccgccgggaggctcggctctccttccccggggttcgttagggcatctttttctttcccttccgctccccgagagctgacgggccacccgtgtcggtgcggctcttcctgactcagataacgtgtctgtccaatgcctgcttttgacagatatccgacattcacctgagcagatttcaagatccaggcagagcgctggccttagagaagttctgttcggaaactattgacatcattcaaccggctcttgtcctggccactggtaggaaggattcctgtgctgtgtgcggtgcggtggtggtgttctatggtcctgatggtagaatgggcagcagctattcgcttgagggtgttggcaactctggccctagaccgtcagtgagccctttgaagtggtggataatggagtcaggatccaggctaaatgctttgccatctcaaggtttttctcagtaggaataaggcttgtgatgcttacgaccagatgttgtctgccatatttgtgttgtgtgtgtgtgtgtgtgtgtgtgtgtgtttatgtgtgggtgtgtgcgcacgtgcacgtgtattgatggtgatgatgtcctgatgaatttgaatattagggggtgccctataaccgggaatcaaaagctctcctttgctgacttatatttttctgtacaaggaggttatgttttcagttgtttgaggactcttcaaacctgtgcacatgtgaccccaaaggttgggtaggaaaagctccaaagagttatgttctgtgttctgttttttgggtggctcggctgtcactcacccttctgaaacatgtctcttactaagatgaagtatctgtcctcagataatgaataagtccctgcttcaggtgttctgtttacttcctagaaactttagcatttcattggtcaaactagattgttttttgctctgaaataatgcttggtcacagcataaatcctggtttaggggttggaaaacaactgttgcaataggtaataggcacttgctacaatgttgcaacatcacacaaaggagtttcattgaattttgtactgtgtctcttttctctctctctctctctctctctctctctctctctctctctctctctctctctccttattatgtatatcatgttctgcctgcatgccagaagagggcactagatctcattataaattgttgtgagtcattatgtggttatagggaattgaactcaggacctcaggaagagcagccatctctctaggccattgtagtgggctctttaggtcattcccctccccccacaactcactcctaatatcgctatagactacacaaacacttgttaacctataataacaatacccttgctgagataatcttgttagtttaaatggcttaaatggtttgctttggacatatgtggactcaattgatttttgtattcgtgctgaatagtttacaaatttgtgttgaacatgcttgtttgagtcccctggagtttattttacatttcaagtccattctgtgtaaacccacaggagacctgacagatgccaaaacaaaggaacacttgggatccagacaacatgaagtagaatggcaaacttaccagagaattctgaaaaagacaagagtcatggaaaaaaccaagtggctggatatcaaaggaaatcatggtaaatctgccaagagcagaatagaatatagcttccttcaaaaatatagatttttctagtttagattatagagttataaaatggaaaattgtaacataaatttggacatagtgaaggctaaatctcttatgtgcagctataaaatacgatattaagacatcagagacaggtagagctctgtgagtttggggccagactagttctaggtcagctaggctgcatagcaaagcccctgtctcaaaaaacaaaacaaaacaaaaaaaaaaaaaaaaacaaagaacattgagatggagatgtcattgttggcctttccagtgaaagttgatatagtgttttcttctttatatgggagaaagtgttcttcagaaattcttgtgggaaaatgtttaaaatgggtaaaataaataaataaaatagaaacacccctatatgtgttaaaaaaaaaaaagaaactccatctacattttcctgttgtatgattccatttatatgacattcaagaaaagataaaaactataggcagaaagacaggttgtggttgccagaggtagaaatagaaggagaaactgactttaaagatttgggatgtgattgaactgctattttgattgtggtcttaaatatataactgtgtatttgtcaaaggccatagtactgagattatagcttagttggtagagtgcttgcctagtatgcatgagtcatttggcttggtccctaaaactgcatactggatgtggcagcattcctgaggtagaggcaagagtaccacaaacagattcaaggtcgttctctctggcagagggagttccaggccagcctgactagagactctgtgtagaagcacttgttacggttgtatagatttgtttctttctgactctataatcccatgattaaaacagcagcaacaagacaggtatggtaacacatgcctatcctcccagctcaagcgaggtcaaggcaggataaacaagtttgaggccaacatgagccacctagaaagtttcaggcaagcagaaacaacagtctactcttagaactttcaaactgatttcttctgaacaaaattacaatgtgcctactattctccggtatgctcagtcagtaaagttactgcttttaaagtgtgcagttggttgacaccttgccatttaatgtgttatagaaagtgatacatgtttgcttttcttcttttagatgcatataacatcccaagtctggagagcatcaccaattattacaggtatctaaatgaccacaagacagactacgagatagagtctatcaaaagaaggggacagtccattcaataaatggataaactcacttctaacagatgaaatttctgtagaaagagctttggataatttagaaaatgagtgtgtggtgtgtgtatgtatgtgtgtgtatggtttggtatggtgtgtgtgtgtgtgtgtgtgtgtgtgtggtgtatgtgtgtgtgtatattacaatcagtccttttaaaaaatatttttctctgctttgatactttttggaatttgctttcaggttggtctgaattgtctaattctccttctagcctcagcctcacatgcactaagaatatagtcatcagccaccatgcctggctctcttctgctcttttttgttttttttttaaatagagtctcactatatagtttgtgctgaaatggcctggaactcaccgagatctccctgcctctatctcaggaatgctagaattaggggtgtgagtcaccacacccagcctcctttaattcctttggttgcagttggtacatagaagtgtttagatcagagcttgtaaatggactactgctgaggtcagtgggttttcagaattctgagagattgattctatcggcctctagagtggccacagagatcagtggccaccaatggttgtttgagcctgtcatctgactactataaacgttaatttttctttatctgtcatgaatgtggtccgcccaggcacctctgtgttagaagcaagctctagcttcagtgtgttgggaggcttcttgtggttgctgtttcactttcagctctggggcactgaggagttttggtctgctttgtcactgaatgaagcactaggtgttcattaagagctctttagagctagtgccttcaagaaatttgtcttctgttaagagaagatgtactgggggaaccgttagaaaggaacatgaaggtgcggctgatgaaaagctgcattatttggttcatatgagaaccattacaagaaatctgaaaggtagaggttgtcacagggctgacacagagaaggcctgtgaagagtgaagatgagttttttggtttggtttggtttggtttgatttgatttggtttgtttgttttggttggttgggtttttggttttgttggttttgtttttgtttttcaaaacaggtctcactgtgtagctctggctgtcctgaaactttaaatatgtacttctttgtgagtacaaggacctctgtatgctcaacatacctccagtagaatccatgcttatctgggtggttgtggctcacatcttcaatcccactgaggaggcagagacaggtgaattctctgtgagtttgaggccagcctggtctacagagcaagtttgaaactttgtttctaagtcttacatattgagtacactattacataagacacttagagaaaagatacctttttgttgttgtttgttttttgtttttttttcgagacagggtttctctgtatagtcctggctgtcctggaactcactttgtagaccaggttggccttgaactcagaaatccgcctgcctctgcctcccaagtgctggaattaaaggcgtgtgccaccacacccggaaaaagatagctatttttaaaataaagctgtaaaatctgaatattataggtgcacatctgggaagtgggggagggtccctgcaggtgtcatataggtgacatctgccctaaggacaggtaatggtctagggagggaagaatcttgatgaggtctgtcccttcagatagcaaaaaggtcaccaggtcattagcaacctccactctcagctttctgggtggaatgcagggatttgattttctctcctccgctgaggagacgccctgtgtgttaacgttcctgggtctcttagtgctactctgtgagtacaaggacctctgtatgctcaacatacttctagtagaatccattgctttcttttttatttattcaataaataatagatacacatcctttccattcttcaccctctttcttcatggctactggaatatgcttgatacctaagatactaaggacattcattattagatgtggatcctgtatatatcaccaatgtatatttgagaagccagaaaatttatgtacgtgcttctagactatcagtgtcctcctagcttgatgacttaccttgcaagcttccttacagaatgaactcctttaggcccttttcaagaagtaaataccttctgtatctccccataccaaggtttccagacttccaatagactcaacaagttttcactaatatttttgaatattttaatattatgctaggtatctgatccaaggctacctacctaccattgcactgcactgctaatcctcactgaaggtttttaaaatttcttttattttatgtatatgaatgctttgtctgcatatacgtatgtgtaccctgtgctaacctgatgccccacagaggtcagaaggagtaagaattacacagagtaattggaattacaggaagctgtgagccaccatagaaggactaatagctgaactcaggtcttctgcaagagcagcaaatgctcttcccgctgagccctcctgccagcccccttactgaagatagatttggtctttttttaaagatttatttttaaattttgaatcatgcatttctgtgggtacaagtattggagtacagctgcttatggagtcagaagagtgtgttggattccctgttatcaggctttagtgaagtgcaaggcataggtcataggcactaaggaggcctccgcaagaactgtatgtactcttattcactgagccatttctctagtcccgactcaaggttttagagactgataaataatagctcactggactctgatttgtgttgtgaatgtttaggggactgtttaagacagtcaccacctgggcttcacttggtgactttgtgtgttgtcctgcattaattaatttagatgagtccttggagataatgagagaaaaatgttgaaatgcaatccttttatcaagtgaaagcatagtttagtgaatttttctttcaaatggaaaagatctggtgtgatagttggaacagaaaaagtatatatctcaggtacaattttgttaggatttaaaagaaaagcactcagggctggcagactgtaaatctcagcagttgcctggaagaaagctgagagagaagggaaaaaagccatgccatttaagcctccctggtgggcaagcagttacatgacagcaagtgagcatcagggagccagaaagcccaggcagggatcagaaaaaagcattctcaggttctgccagcatccgaagaaaagagacaaagaaagtgaaaagtttctaacttgggcctcagtcaggtagttactcatggtggctcctagtcactacactgagcacggagcatcttgggaagaaaaagcacagttatcttattaaagaagaaattatcccaaagccagacatggtagcacttgcctttaatctgagcactcaggaggaaataaataaataaataaataaataaataaatgaaaaaaatgcatctcactttggcatggcttagaatgattctgccttcctagtgtggtctcttgaccagatgaccaatgcggcccagttggaatgattggtttctgtacaggccagagatctattctgttgactagaaggatttttttcttaatgagcctttattgctggtctaacatgaaatttactctttttataattgcactaaagccttgctgtctgtgtttttaggaagtactctgctgtgcggaaggacggtgcttttcatcacatccacagcactccctttggcaactattccttcatctctgtggatgccacccaaaggccagggcctaagagaccctataatttctttggcattttagatgaggtatgacttgaaaaaaaaatcacttccacttgcagcttacctggttttattttttcttaaaaataaatatatttgggtcatttcattaccttgaataaccatattctcatctaggtatgctcaagaaaaattttactgtggttacaaatatgtctagaaactgctagtgatttcaaaattcttactactgtctctattcttatccaacagttgggaaggaagcacctcactttttatatttatttagcaaatgtttattaagtatggattaagtataggatgtattcaagaaactatagagcatatagcttggtgtactactgttaaattccctcaattgccaatattaattagtggtctatatttttctaaaaagagaacaactcaaatattttgtctaggctaagtgaaaaactgtcatttataaaagcacctatgagaagctcttgttatgtcttggaataacagatgccaggtaggtccttatttgatgagtgcattcttacatgagacacgtgtgcctgtttataagagtataaagtaataagatcaagaaagttcttgagtgtttcatttactgttagagcatctgaccagtatagaaaaaattatagtgaataacaggatttgccaaagactgaaagaaattcagagttatgtgaaggctctagaaataaagaacacaggataaagttatgttgtgtttcccagttaccaagtgcctttagtgagctggtgaatttaaattaaatttttttcttagaatagagttttaaagatacagtgtacagaccaagtacataaaaaccaattgtaatgttacccaatgcagaattcctgatctttgttactattttattattttaggtttatttattttgtcttatgtgtataagtgtcttgcctgcatgtttttaatgtggaccatgtgcacgcaatgcccatgggggccagaagagggtggtagatctcctggaattacaaatggttgtgaaccatcacatgggtgctgggaactcaggtcccctgcaagaacagccagtggtcttaaccactgaaccatctttgcaacttctaagtcttcttagtcttaccccagttttaccaaattagaaatcctgagggtaaggctcagaaattcattgctgtaagtgtgctacagacattataagtatatattatatgtacattatatatgtgtattatatatgtgcaaattaagttttgaagtcaatgttatgaggtggtttatatatagtaagtgtttgaagactttacaaatgtggatgctgttataactctcacacagttaaggcttaggacacattaccaccctaggaagttttcctgcaggtctttactcccatggtacaagtgattgttttctatcagcatagttttattcactctaaaattctaggtaaatgtgaccatacagaatggtcttttgggtctgatttcttattctcttcgtgatgcttctgagatgcatgtatgtggctgtgtccattcgtagttcttaccttttcactgctgagtagtattccattgtgagggtacattatactttttttggagtttctgatatttgactaatatgaatagagctgttaaggacatttaggtgtatgtgtgtggatgaataacatatgtgcatgttttagcattgtggcttagtgtctcttttaaaaattgtgatgtagtagtacacacaactgaaaagattagttgtctcactaaggggataattattctcccctgggattgaacccagggcctcatgcacgccacgaggctaaagctttacccctaggctacatccctagccctgaaaagattaactaacttagtcttcagtttttatacatcaaacacagggggtgcttgtccaacatactacagtcaccttagaatcaaatgaattataaagtagatgaaaacagtttggaaccgacagagatccatttaggtcattaccttgtagaattggggtcacagggacaatgagattattgttataaactttaggggaaatgtttaacttgtcagcattggattttaacctgagccccaagttagagatccttctatttttctcccattttagaaacagatggaggaactcgtagagttttccaagaaaagcagtcagagcaaccagacgatttggtttggccactttacaacatcaactatcatgtctccatccccagggatccggacagtaatggggtgagacagatctgtagaaccagaactggttatttctggctatttcccattgctgagcccacttgcttttctgaagagactttcctactgcctttgttgctttatcctgtttgtgttttgttgtgtagttccgctacagcttatctgtgtgggcacctccatacgcttggtgggctgatgcctgttctgcacacccgtcacttcacaggcacgctggaacttgaggtgggagactggaaagacaacagaaggtgaggaaacttccctacaagggaaacttacacagattttgctaaaaatagtgacactttattattaataagatgggtgatcccaggaataatttgtgataatgctgttagttaagtttgctagttagaaggatacccaggctaatctttaatccttctgcctcagactcccacatgctgagatcacaggtgtatagcagccctaactcaatatttgttcttttaaagtaatatgtatttctttgcttgttgctgtggttaaatacttagacaaaattacttaagggagaaagagtttacactggctcacaggtcaaggagacagtccgttatgctgaggagagcaaggcagctggtgccatcgtgtccacagtcaggagcagaggacagaatgagctctcttcccttccgccatccttgatcccaactagggcatggcacccacagtggggatggggcactctttctactccacttaaaatcaggcatgcctacaaacccatctcaggtgactctaggctctgacaagttattagttaatatgtatttgataatcatttccattacctaaaacttgttttaacagtattttttgtattactttttatttactcaattgtttattttttgtttgtttttttaaagatttgtttatttattttatgtatatgagtatactgtagctgtacagatggtagtgagccaccatgtggttgctgggatttgaactcaggacctttggaagagcagtcggtgctcttacccactgagccatctctccagccccatttgttgttttttgttgttgttgttttgggttttttttgagacaggtttttgtgtgtgtgtgtgtgtgtgtgtgtgtgtgtgtgtgtgtgtgtgtaacctggatgtcctataactcagatttgcctgcctctgcctccttagtgctgggattaagggcatgtgccactacatccagcttatttttaattttttttttaagatttatttatttattgtatgtaagtacactgtagctgtcttcagacactccagaagagggcgccagatctcattacggatggttgtgagccaccatgtggttgcagggatttgaactcaggaccttcggaagagcagtcagtactcttaaccgctgagccatctctccagcccctatttttaatttttaaattaggtatattcagtttatgtgaatgctttgtaaatatatatgcataggtcaaaatggggaacagatcatcagatcatctctggacctggagttagggatggttgtgaaccaccatgtggatgctaggagccaggttctctgcaagaagagaaagtgcatttaactgtaaatgtaacttttattctcctgctgtaactgtctgggaggcttactgcctccatctgctaacctagtcctagatctggaagcttctagccactgtacaatctaatctaggcctagaatgttttcaacttctaagacttgctgctgaataagctcacccttcccagctctttctgagctctacctggctggttcaactcagctgttctggctcaaactcctctcccagatgactgattcaatttggcttctctctcagcctctgactgaattgctctgcttggccttacactaactctggaatctgttctaactttctggctcctcgttctctggctcgttctcttttcaacctgcctctgtaaagctctcccagtaaaactggcctcccccttcttttctttttcttctctctttcttctcactttctgcctgttctgctctcttaagtagcttcctttcctctctctttgtgagagttgggcatattctattctgtcaaatctctctctgattcatcactttgtctgctgctcaattagaaatcacttttaaacatggttgcttccttctacaaagtaactttgccttaattgcttggaattaaaggtatgtactaagtgtgtgtctgtattccagccagagagattaaaggtgtgtgctaaaggcagagccacaccgcaactagannnnnnnnnnnnnnnnnnnnnnnnnnnnnnnnnnnnnnnnnnnnnnnnnnnnnnnnnnnnnctctccctctcaactctactgcactgctctccaggatctctgctgtatcctgtactacactctcttcctgtactgtttgtctctcccttaagtagcttctctttcctattctgtcaaatctttctctgatttgtcactttgtctgccactcaattagatgtcactttcaagcatgggtccttccttctacaaactaactttaccttcattgtttgggataaaaggtgagtatgaagggagcgtctgtattccagccagacggattaaaggtgtgtgctaaaggctgagccacaccctaactagaaacaggttcaaatatcctgtaacacttaactactaagccatctcctcagtcactatagcactgatgtttaccattattatgccatgtaaagtttaagacacatgcattaaaatgtaagttggtttgtttgttttcttttgaggaacactctcaatatatatagcccctaactagcctgatactagctttgtagactaggctgatctaaacattgtagtagtctgtagactgtgcctctggagtggtgggaccacagacatacaccactatgttggctctttcttattccttttgtttgtttcttgggtcagttgttggttgggtgttttggtttggtttggtttggttttcgagagagcttttcactctgcagcccaggatattctagaacttactctttagcctagactagcctcaaactcactatcctcttgactcgtcctttttaaagatgagttttacagatttgagccaccacaactgcattactatatagttttaaagtcaagtgttagcaagaactgtgaaagatttttaacaatgcccacgtctcatcattaaaaacattgaattggtgtgggctgggctgtggaccaaactttcagattcactggagctgggaattttttcccttgaattttctgccagacattttagttactgctataatagtaatttaaattcttcagatagataggagtttatatttgatgtagcactgttggtggaataaagaatgccagatcttagatcttaggatgtacaccttagtttcaaaatactcataaaagtactgtctaaaataaagtgaacttattttaaaacatttatctttaaaatcaagaagtgcaggcattatcctaaatgactgttagcgtcattacctcagtcagctcccaggtgatcagacagggtgaaggataaagcagtaagcaagagagaagcagcaagagcaaccttacctcgtatccactcactgtataaaaagtcctagttttgtgggttttatttcttatctgcattttactttcaagcaccagccccccttgagaaagggtgttacataacccaggctagccttgagctcactatctagctgaggatgagcatggacctaatcctcctgcctccacctcctgcgtgttgggactgcaggtatgtgcctctcagctgactcacgcagcgtgggagcccagagcttcctgtgtactaggcaagcactccaccaactagctacttccttagcctcctttcaagcttagagtaataagtaactaaattcccttattctcctatggcctctaggtaccggatctttgcctttgatcacgacctctttagctttgcagatgtaacctttgacaagtggcctgtggttctcatcaccaatcccaaatccctcctctatagctgtgctaagcatgagccgctagaaaggctcttccattccacacacataaggtatgtcttatgtttcagaattgactttccatttgatatggatgaagaataagttgttgtgattgttgtggtgtgaaagctagggcatgcctcactgttttttcaacagcccaaacatataaactgtttcctgtttcatttccattcaatatacatgtatgcatgtgtatgtatatatatatatatatatatatatgtatatatgtatgtatatatatatgcatatattacacacacatgcacacacacatataaagcttgggattttccattcaatatacatgtatatatgtgcatgtattatatatatgtatacctctgcatatattacatgcacatgcacgtgcacacgtataaagcttgggagtgggacttgaaccacagtgtcacactcacacatgtcaggcatgtgttctaccactctttctagacccccaaatgtagttttttaaaaagctgataaaatctataaaatcatccagaaactcaagccagtcattatttttgtgtattttattccaacctttctattcatatatgtttactttgttataactatgacatattaccttataacttgtacttatttatttatatttattaattatttacatggttagggataaaattagggttttatatattatagtcctcaacaaaacattacagacaaccacaagtataagctcaaatgagagccctttctttcagcttgagatgaaagagcaggctcctgttacaaagaaattgaggacagcggggtttgtaaagcccaaactgcagttataccctagcagaggcaagcaagagtcaaagtttcaaagcttttggtacagttcattagaacaatggtgggccttgtgaattgtcctgccctacagggtgtggtcctgggctgggagcagagggtggagtcagagggagtgagctggaaacagggcgaactgatactttgctgcttccattattcctgtgaggcgcttgctcctcctcaaggctacacctcagtccatcatgtgctacttttagaaatttgtatcattacgatttttgtttgtttgttttgctgaataacctgccaaaaaaggcaaaagttgtataatcctgatgaaattaaaaatatagtttatagctgggtgtggtggcacacgcctttaatcccagcactcgtgaggcagaagcaggcagatttctgagttcaaggccaacctggtctacagagtgagttccaggacagccagggctacacagagaaaccctgtctagtaaaaaaacaaaaaacaaaacaaaacaacaacaacaacaaatatatgtatatagtttatgtttagtttatgtttgaatttggtgatgcttgttaatagaattataataagacattattttttaaaaaatatctttcaaatgtaagatcactttaatatatattaaaatataaatatatatacacacatatatgtatgtatgtactaatttttcaagacagggtttcactgtgtagctgtcctggacctcattctgtagaccaggttggccttgaactcacagagatctgcctgcttctatgctaactcttggagagtacagtgctgggattatgtgtgtgtttacccattttgaagagctgccactagctcttctggatgctccttcacaagtgatctccataagacacatctttatatcactgttttcagagagcacagtccaagcaaatgcctttctctgtgcacagagaatgtaccacaacttaaccactttgttgtttatttatgaaatgttaggattgttctcatttgagaatgaacatctggtaagagcaggttttctcttgtttgaataaatgcttgaataatttcttttttctatttttggttttttgagagacagtttctctgtgtagccctgactgtcctggaacttactctgaatctgtttaccaggctggcctcgatctcagatccgcttgcctctgccttctgagtgctgggattaagatgtgggctaccacaactatcttgaatgaccttcttaatgatagtgttgtagaagaggaacaaattcttggaatttaaatctttatttattttttattgagggaggggcatgcaaatgccatagcatgcctgtggatataagaggatagcttttaggagctggttctcttccttctaccgtgcagatttgaaggtttgaacttacatcctcaggcttagtgagaagtccctttacccactgagccatctcagcacccctctcatatgaatgttgatgaagatcgcctgattacttttttatttttttagaactaaaatttttactcttccctccccgcagctatggtctctttatgaagccctgactggcccggaagtcactacgtagaacaggctggcctctgcctctagggtgctagaatgagtgtggtttctaggctaccacatctggcctatcaatcacatttttaacgacatctggatatcagtgctaggtgttatctaaaaggcctggtggctcagctctgggtatggccttgctttttctggccaatacatcaggaatcaaacgaatgaattacaggcttgacattagattaacaggatatgatatctatttgatattctatgcctaagattaaaaccaggaattcaggaatttcttcagaaagaatttttggtctaccctaggtagacttatcaaaagaaactgattttgttttctggaaaaaaaatgttttgggggcttgggatgtaattctgtggtagaatacttgactagcatgtccttaatatcacacacacccccaaaaaagaagtttctaatttcttagcagttcattgctgaattgtccaaagtctgcagttgcacagtgtggttctgcctaagttcatgtcctcagactacagtagcattgctctcctctataaacacaatgtcctatacctaaaatcatgcattttatatatgctcttattttagagtattggccttttccttatcccccatcacttctgtcactgttaagattgatggaggtgatataggccaggcttctcacttgtctggtcctattttcatactgaagtggaaccctagaaactacagtaatgggacacataccatagaagtattcgcccaggtaagttagtcattgttagtttgttgtgtcaatgattgggctcttgccacaatgaactctgatttgggtttattgctagtcaattggtaagcaacaaatttgataaacagtaaacaaagtttgaatacagtatatctagcatattgttctggaagttacattttacttactttatgtgtctcggcagagaagactgtatgataagaggctacagacagtttgtggggcttggttttcctttaaataaccatgagggtcatgaggttctgctcagggttacttagtggcaagctccttttacccactgagccatctcactggtttcaacaggttttcttgtcccttgtgatcttccttccttccatctttatccctgggcaatcactaatcagttttcaatcttacatgtataatttttaaaaattaacctgctaaatcttggtgaggtaccagacatgtaatcctagctactccagagacctgaggaaagagagccatggagtcaacccaggtatatagtaagatgctgtctcaaataatttagtctaccaaatattagataggtgtcctggttctttcattcattaatgctaaatttctgttattttaaatacaccacactagaactagaaaatgtaactgttactctcctgtaataattgtcatcttcaaggcttattgcctcagtctgctaaccttggcctagtcctggaagcttctaggccatgtacaatcttatctaggcctagaacattttcagcctctgagacttgctgctaaataagctcaccctttcttgttctttctgaactctacctggctggttcatctcatctgttctggctcaaactcctctccaggctgagtgattcagtctggcttctcacagtttctcctgaattgatctgcttggctttaaattaactctagaaatctgttctgatcttctggctccttctcattctctggcttcttttttcatttgtgtctaacttgttctctctctgtaaagctctcctggtaaaactgcctcctttctctttcctttttcttctctctttcttctcactttctgcctgttctgctctcttaagtagcttcctttcctctctctttgtgagagttgggcatattctattctgtcaaatctctctctgattcatcactttgtctgctgctcaattagaaatcacttttaaacatggttgcttccttctacaaagtaactttgccttaattgcttggaattaaaggtatgtactaagtgtgtgtctgtattccagccagagagattaaaggtgtgtgctaaaggcagagccacaccgcaactagaaataggtttttttttttttcagtaaataactcaatctttaggttcacaatgtgatcaaatatccagcaacagataggtctgattgtgtgtgtgcgtgtgtgcatatgggtttggttgattcaaatcagaatccaaacgaggctcacagaattgcagctagctaaatagtgtctcccatttcttttactgtataagccctctcctcactccggacttattgtcttctgccttaccttattttgtaaaaactattttcgattttcatatatgtgtatatggtatgtatatgtgtacacagtatgtatgtgtgggcatgcatgcttgtatatgttgttgcatgtgtgtgcatgcatgtagaggcctttggttgatgttgggaatcatcgttatttgctctgccgtcttactcattgaggcagggtctctcaatcaaagccagagttttcaggcatgtctagtctccttagctaactggaggatcccatttccaccttctgaggttggaattacaggctagcaggccacccttcccaccaagaacttatatgactccagtcctcatgtttgtgcacagggacttcagtccctgagccacttccctaacccttgctttattttttgaggcagggtctctcactgaactgatatgaataaattggccagctagtgaattctgagactcaagctctctttttcctccctgtaggactggggtttttgggttttttattttttttgtatttgtttgcttgattggttggttgactatttatgtatttgtgtttatttatatctgtgtaagagtgtacatgcacagaggctggaagaaggtgtgtcagatccctcagagctggagctaacaggcatttgcaggcaaccaagcttgttatatgagtggtaggatccaaaccccagtcttcatgattagattatcttgacagcccattcctggctttttgtatagattctgaggattaaaattgggtctccgtgcttcagcagcaagcattttaccaactgaaccatcatctctctggccattttcttatccccctcctcctcctcttcctcttcctcctcctcttcttcctcctcctcctcttcttccccctttttaaatgcagggtttcactgcctctgcatcccaagagctgggattacaggtgtgcaccatctcacctggcttcctcttgctcttcacttctccatttttctcttctcctcactgtctaaggccagcactgcttctaggctgttcagctccttagccctgcctccttcagattcagccttcaggtttagtgtgggaagacaagacaggtcttcaagcccaggaagcctttgttgttgacagactgtacataggtatataatcagaaccacacacacatttacgcgtggctgcaatttgcttcctggctgtgtttctaactaggattctgctggaagaagtaggactgctcaccacatattttctgcccaagaggatgctcatctcacatttgatcctttggcatcatttatcctccttactgaccactacattgtggtgagtaaattcaattaaatgttacttgtgtatgtgtgtttgtttgtttctgttcttactggattttgtgaatgcaaacttctaagtgttatagttatgtgtcaggaaatctaaaccttatttaaaaaatcaaagctatttatttatctatttatctagatatttatctagatgaataaaatgttttgtgtgtatgtggtaggggatgcacataccaaggcattgtctggtggttgaaggacaactcactagagttggttctctccttccaccatatggatccaccccaaggattggattcaggtcatcgagcttgttggcagtgactttactgctgagtcacctcaccaacccagggatttcctttctttctttctttctttctttctttctttctttctttctttctttctgtctgtctgtctgtctgtctgtcttttttagatctattaactcttatgtgtatgactagttgcctgcatgtatgttagtgtgccgtgcacgtgcctggttccctctaaggtcagaagagcagaccccctggaactagcatttggatggctggaaaccattatatggatgctgggaaccaaacccctacatttcttttgactattttcttactttaatgtatgtgtgtgtgtgtgtgtgtgtgtgtgtgtgtgtgtgtgtgtgtatttagtttttattgatttttgaggcaaagtcttactgcgttttccagggtagccttagacatttgaggtcaagcaatcctcctgcctcagcctcctgagtaccatggattattcaagtgcataccactgaaaatattatttcataatgtgactttagttgtgttatattaatatatatgaatacattctttgattaaatatttaaataatatcttaaggtttatttaagaaataattaaatgaacatatatttatttaaccaattatttattttaaattatttctaactttttctagtaatttcatctagtttttccattattgttaacgtaagtttcttcggataaattcctataactgacttgctaaatgaggagaagtcaaactatttttaatataactacacaatttatttattgtattgttttcccccatcttcctcattaaaatataaggccctcgagagtaagggattttggtatacctatcatatagtaggccttcaacaaatattttttagtgagtcagtgattgaggacttttttgtttttgtctggttggttttgctttgttttattttaacatatactatccaatggtcttgagagaggctgtagcaatttatactccagtttcatgagatcttccttatcatgaatattataatctacccctgccccgtatccaacttcaaataaaacagattacccctcaaggatgatgaaactctaatattggtctaagtaaattcagaaaattcaatactaagcacgtttattgtactatcggtgagttagacatttggttctcttgaccatgttctttttatattacagagtatttttgttgttgttagtggtaatgatgctaaaaacaaaacatcttgtttctttttctacacatacttttcataccaaatgtgtggggtttaaataattgtctagttctcggtggactgattgggcatttcggactctaacttgggcaagggagagatagagtcgatctcacctacagactaagggcccagtcctacaaagtcaccctcctcaccaccctgttctcccaaaagtcccctccagaaagccacctatgcttcagagaaatgagctataaacgggaagtttctaagacactctttttgggatttgctagactgacttacagaactcagaaatgtagtttttttactggattcctaacttattatgtaagaagacaactcagtgtcagccaggtggcagagagggcagggagaatcttagatgttcacatccatgtcctcccaggcatgtaccactgtgctagctctcctgcccttgactagaacagcctctgaaccctccagaggatgtctatgccagtctcactgtgtagcatggctgattttattattggccattagtgatgaattctgcaccctcttccctggagagcaaagtgggtgatgtgaggatgtgtgctaatcctcagcacatagccggtccctccggcacctatccccctccttaatggcttcctaaagcttgtcaccaatcacaggtgacattctctccactcaccacctcacagttgtttcaggaacttctgtctacagccaagcatttaaacaggaagtgatttactattttctattatcgtttataaaattataaaagtcttagtagttactggagaacagaggacgaagaagactaaaacacaggtttcatatcgcgccacttgcatttctgttaatgaagccagtatgaaagccttgtctggagccatgcccgcacatctgttcacattaatgtcacttgtccctgcaggcccgggtcctgtttgtgttgattgtgctgatccagctcaccacactgattacattcagatatctagcatacccagagcttaaaggttagtagtcatgattcctttattctaaaagatgtgaaagcatctcctgatgccctcaccattaacaagcatacagaggattctgtgaggtacagctttcaaatgaacagtttctttcttagtcatatttttatcttgaaaaataattcttttcacccttctactgtatggcaataaaatgggagtttaataaaatgggggacattcgcaatatatttataattatatatttaaaatattatatacaataattatttaaatattatttaatttataagtagctacttttaataaatagctatttaatataattttatgttgaaatatatttgaatagaaaaaataattcaaataattaaagataaggctttaatacaaacttggaaaaaattgtctggacatagtatgcatacatttagtcccagaactcaggagacagagtcatgtgggtctctatgagtttaaagccagctagagttacacagtaacagtcactatcaaaaagttgagggtagcatttgattggtgcatgtgaccttgaattaccctcatagagcaggctgtagaacagctgcaaagatgactttgcctatagtacttgccacttctcccaagaggaatcttcatggaaaggttccatgattatatttgccaagctcttgaggtgcctttgtcataaagtaatggctaataacaattaattgatcatttctcataaacaactcttgttagaagaaggtggattttcattgagggctgagcaggaagagtcctatgccctaaccagacattgttcctcctccccatagtcatttccttactgctgagagcctgtgactgaaggaagtgactgtagtgtcatagttacatctcaccttagaggtcctaaggatgactacctgtcctgtccttgttccccacccaccctaactgacacgtgtacaaacaaacacctaccttgctgccttaaacagagcagctgctccataataaatgataaagtctgccgcatctcaccctcactaaggaagtcatggagacttccacctgctgtcaggctgagtggtgtgtgcacatagtcccagcacaagagaggtggggacaagaggatccagatctagaggccagtctgagctgtgcagtgaaacccatctcaagagcaggaagaagactttgtgcaccaccttgataaccactaaagatgatgcttatttcttctgagctgatatcctgtcagcagagcagggcaacagcaccggacagagcttttagtgacgctggagcttactgtgagtgtgtttaaatgaaagggtaatttgtgtttccactcgagctcttcctggtgaaagtcccattcctagtcatgttcatataaaaggcctatttacatacagtactgagtatagacttacagagctgaaacaggtagctgcagctagctaacctttctccccagttttcaactgttcatcatttactacacagtctcacttggttctgtcacctgcttctgcttaggctcaggctagtaggtgggcagagaagagctctcctttctgtccaacttgtgttcttgatggcttgaaaatctgtcccaagcagggtgtggtgtggctcatgcctgtaatcctaccactcaagaggctaagacaggaggattgccatgagcacaaggagagcctggactcattaacaagttcagcaaaggctggatataaacataactcaaacaaatcagtagccttcctttacacaagcgataaacaggctgagaaaaatggggaaacaacatccttcacaatagtcacacataatataaaatatcttggtgtgactctaaccaaacaactgaaagatctgtatgacaagaacttcaagtctctaaattaaaatatcaaaggaaaggaaaaaagtcatttcttggactttgttgtgataattctcaaaaaagaaaagaacctaaggacattaaaaaatatagattcctaggccaacttaattccagtattcaaatatctgagcagcagcacggaaatctattcttgtttgtgtgattccgaaaagcagccaggtttagaaagcactagtttatattccaagtccaaaaagagaaacaagaactcatagtctttgtgttagtgttgatagggcttttctgttaatttctaaatcctttgagggttaatgctgcattactaactttaaaataacattaaaattgcatgccagcactttcttcctagctgattagcttaatagcgacaacacatagcttcacagtctcagttatcgggcatgaaagaaatatattcctttaatgattcaaagaatctagtttcgaagtatttgaacaacatcatgaccacatattaaagtaaagctagatattggtttgttagggctgaagtaacaaaacaccaaagttggcctaaacaacaacaaaatacttttcttgaaattccatagctaaaagtccaggatcaaggctctccaccctctggggcgtcttccctgccttatagatggcgcctccttccctctgtccttccacagagcatccctagatctgtgttgtctgtcaccggtaggtagagcgttatggtgagggctgctggaagaagaacctatcatatgtggagaaggactttttggacagatactcttgtgtaagataaaaatggaaactatttatatatttgataaagcttttagaagtttgtgcatgggctggagagatggctcagcggttaagagcactgactgctcttctagaggtcctgagttcaattcccagcaaccacatggtggctcacaaccatcagtaatgggggatccgacgccctcttctggtgtgtctaaagacagctacagtgtactcacatatgtgaaataaataaacctttttaaaaaagtttgtgcacttggatactgaatcctatgaaaagagtgagggctgtattagtcatcctttgaacatggcacagtctttcaaatctacctgaggataaaatagtatactatagacctctggcacgtgtgtctgtcatctaaattcatcatctacacaagaattcaatatattataatatgtatataattacatattcccttctatgtttctatctatacaatatcttacaacaaaatccccctttgagcttcctaccatctgtgattttgtgtgtgaatttgagtaacatctgtgcatgtagcaaaagcttccacattagcaaaaatttcactgaggatggaaggtggtgacaaggaaatattctagaaaaggtttaaagacattaattttgcatgtatttactaggtttttaatttttcttctgtttagaacctctgggatttgcaaatatgaccacattttcccttcatatcttgagcaaaataaacatctcctactattctgttttgttgttgaccttgtatacagtgctgggtaagtaaagtataaactctgagattgtgaagaattctgctaaagaatatattgagaattttgacaacaaaataatttatactccaggtataacaaatggcctacaagtccttcataaataatttcctaggagctggttttaataaataaagttatttctttttttaataaagatttatttagtattatacataagtacactgtagctgacttcagatacaccagaagagggcgtcagatctcattactggtggttgtgagcccccatgtggttgctggaatttgaactcaagaccttcagaagagcagtcagtgctcttacctgctaagccatctagccagcccctaaggctatttcttaatatgtttaaaggatatgcagtaaatatcaagttaaagaaaggatattaaaaacactaaagaatcaggatttattatagagatatagtaaacaatagaagttctgtataaatctactttcacaataccttctctgaccatcttaaaagtttccatttttattacattacattcatccggctttatattattctgtttactgtgtgtttccctatcagaatatccatggcatcttgtctctcctgcctacttatatgtcaggcactgagcatctgagtatgtagtttggtgaatatttatcactatgtagaccaggctggctttgaaatcagagatgtgcctgcctctctctgtctcctcagtgctagaatattaggcctgtatcactacacccaaagaggagagattttaaaaatagtgaggaaggacatgaggcatgtggatctctttgggtttggggacaacctgctctacatagtaagcttgaggtcagccaggtcaacacagagagactcaatggatgcctcaatgaagcaaagcaacaacagaattcatctaaaaaaaccaaagctacttaaatgaggaacgagtttaatcatgcctgaggtagtctattttactaattattatacctaatgcttcatttagtcacttatagaagcagaaagtcaaatgtgctaacaaatacctgtaatctcagagcctgagaggcagaggcagatggctctctgtgagttcaaggtcaacctggtctacatagtgagttctaggtgagtcagggctacacagcacccacatggtggctcacaaccagctgtaactcaatcccaggacatctgatgccatcttctggtctctaagggcacaacatgcatatggcacaaagacgtaatacaggcaagacatgtcataatacacatgaaagtaaataaaatctcaaaagaaatttaaaagaaaatattaatgcgttatattaaagttattacaacagaatgttaaaaatcttgagtgtgatggtgttttcaaaatttataaaccatatacctatttcaagtatatcataaactaaaatgatttcataatccagaaaagtgtagagaaaatggctggttagaatgtcaggtagaaagactatactttcagggatcacttctatagttcgttactagagaagtttctctggctacgtagagcacccgaaaccaggaggatgagacatacctcccctcctgagcgtgaagccggctctaggtgctgcttgagtgcagctgcctcttgtcattgatggttgttcttctgtccttcaggagggtgagagggagggaatgcagtctgagtggacttaaaaaaaatgtcaggtaggaaacaatgattatcaaagaagagatgccacaaagcaaaatgcttagtggtgttgagttttgtgtctcttgcttattcccataaagttgttttgtaaaatatgcaatcagactcaaactttaaattttatttttatttattttcaatgtgtgtttatatgtgtggacatatgtgccacagtgtttatttggcagtcagaggacaatctgcaagagtcagttctctccctccactatgtgggtcacaggaactgaattcaggtggccaggcttggcggcaggtggcctaacccagtaggtgaacgtgctggccaagactcagttgtaacacttctgcttctctgtccatcactccctcaggaccgtggtttgttggtgagataattgatggcaaattgggttgctgcttttcatttgggatatttgttgatggacatttcctgcaaggtggtctaacatttataaatggaattatacaggtaagaggtccccagaggaacacccaggccctattggactaaccatgtgacaggagctccagatcctactctgcagcgtctttcgtacttacttgcacagcagtgtctaatagcccatggtttgcactccttctgttttctccctcttctcttttgtaacatctatatctatttttagccaaaaggctgagaagtaactttagacatctaaaatacattgtgtcacttcagggttctcgttcttgttccattgtgcttttagggatggagtggggtgaggcaaggtctctctatagccctggctgtcctgaaactatatagaccagacaggcctcagactaaccaaaatcctcctgcctctgtgcgctactatgcccagtttttatcacactctttcattgatgaaaatgaaataagagttttattgtagaataaattttacattaccaagtttaaaaaactgattatagtgaggaaaaatgtttcagagggatgaaaagaaaaaatggacacataaggagaatgagttatctaaggaaaacgctgctgtccaaaaggtagagctggacttcccagtgctgtcttagcaggaacatgttatgaaggtggcactatgtcactggaacacactatgggacatcccctgtccagtgttcttgtttgggaaacactgataaagtagtctatattcaattcctttaaaataaacacacaacttatttgcatccttagccagtggctctgtctccaacgtccacctgatttagtggtcagcaagtattgccttaaagagcctaagatgtctcccaatcctggacttctgtttcttctcctcagagtgtacctccctcagctactcattgctgcccttcgtgcttcaaagagtctgtctcctagttaccctttcatgagccaattattcctgtcattgagcttttcacaacccataattgtgtttcaaaatacatgtttgtctgtaatatatatgtattcatatctgtctttaggagccatttaatttttattttatgtatgtgagtattttacctgtatatatgtttgtgtgtcatgtgattacagtgccctgggagaccagaagagggcttcagaacccttattttaatgtttaccaacagttgtgagtgttcatgtgggtgctggaactcaaacttgggtcctctgtaaaagcagcgattgctcttaatcactcctccctagcctgccacccatcccaccctcatccaccccacccccttttggttttgttacttgctcaccaatgtgcctttaacctagagcctagcacagtgcctgctgtggaatcggtgctttatggatatgaaccacacacaactacacctggattttagcctttatctaatttagattttagtactcagaatgctacctcaatactgatacctaagtcctcctttcactctgttcacataggatctatgctctgttgtgtgcctatggagattactcagttcatttccaatgtaaacactgtatatatctgtattacagtataactgtattgcagtagggacttcaacataaatcatgcctacctttaaggtaaacaaaaggacaggcaaatacacagttaactataggtcaactgttctctaacaaagagtatgatcaatgcattaaaaatcaggcatatgctgggtatggtggtgcaaacctttgatcctagcactcaggaggcagacatgtggatctctgagttcgaaaccagcctggtctacagagctagttccaggacagtcaaacagaaactttgtctcaaaaaaaaaaaaaaaatcagacgtataagagttggaacatagctcgggagtagagtgtttgcccactgtatgcaaattcctgagttctatcctcatcttccaccctcaagaaaaaaccgacatctaaactaaagacatattagtagaagttactaacactgagacccaacccttctcagggcagggcatggtggtaagttaatggctctgtctcctttttcctagctggtgttctttaacatccccttgatggcttacgtatgctggagtttgctacatcgctgctttggtcacagcttcaggtctcatctccaccagggaaaatactggaagattatacctgtttacctacttatgcttctactgtacatatggcaggtttattcttgctactttcttcatgtgacatatggctccctagcctttacattctctccattgaggacctggttgacattgctgacacctgtgctcatttaccgtgtgtggacattgaactccactgaacttggaatattcatggtgcagttaaaaagtcatctgagctcctgaagtccatggcttacagctagcagcctggaagaagtccagcctccacatttgtggctcagatctctgccctgtggcagatgggaaagccagtatcagtgggtgagcttcaggaagcagtcactccttggacatctgaatgttggaaatgtttactactgattcttgctgtgtggactgcagaaaagtctaacaattgattcttcctcaggaggcaaagagccctaatcaagaagattgccacagtggggtctctgtgtcactgtgtcccttggtactactgtgtttattagggtcatcctgtgaaaagcatccagcccgaacttggagttcaggatgtcattttctgcctagggagcctgtggaaacttgtcctggacctttactgctcctgagacttgacttcccagcctgtttccccaccgatcatgggctttctgcttccttagccaaggttgttttcaactaatcaaataaatgaatgaatggtagccataaacaatgggttggagagatcagtggttaagagcatgtactttacctccagaagacccgagttcaatccctagcaaccatgtcagatgctcacaactgcctgtaactctagctccaggccagagccactgtgggcacctacattcatatgtgcacagacttacatgtgattaaaaaataataaaagataagtattaacaaagaaatatcacaaacggatctgcaatgttgataaacatatgggagccagaaagtgggcctggtttgggggcttggagaaagagtcaccagggagctggagtcagcagttaagagtgctggctgctcttccaaaggtcacaggttcgattcccttcactcacacagtgtaactccgggtcctggggatctgattccctctctggcctctgcaggcactgccacggacatatttacaggggaaaagctcagttacatagaagagtggccaggtctctagtaggtcaaaagatgcctggctgggtcttttgagtggcctagtgtcatggagggaggggtagtggggtgtagccagggactggaaaaagtctctagatctgcggggagggcaggtgaaggaggcgtggcagggtctccaggccgggccagcggggagtgggcaggtttccagtggggaggcgtggtcttgttcctgagtgggcgggtctctgggggtggggggaggcgtggacggatggccgggctgtctgggaaggcggggtcgctacactgagaaggaaggggcgggacgcgctgtgtgttgccggaaacgagatgagtttttcagcaccggaagtactgcggcggggccaaatggcttaagcgtcttagctggttcccagagagagcctgcgatggcgagctcgacagccgcagtccccttccttgctccgcctctggagcagctccggcacttagcagaggagctacggtcacttctgcctcgagtacggggtgagttatgggaatctgcatcccgggctccgggtagggatgtagggcgtcaggtcagggctcctctcacctgtcttttgctttcggggtgatccggccttcctcaagtcggcgaagcccaggagacagcggaggaatttaatcgagaaatgttttggagaagactcagtgagnnnnnnnnnnnnnnnnnnnnnnnnnnnnnnnnnnnnnnnnnnnnnnnnnnnnnnnnnnnnnnnnnnnnnnnnnnnnnnnnnnnnnnnnnnnnnnnnnnnnnnnnnnnnnnnnnnnnntgtctgccgttgcgggctcttccctcatctccctgcatcctaaccttccctctgctgtcccctgagatgacaatgcctctggttctcatcccttctcccacccattctccgcacttgaagcagaaatataaaacgatttctggagttgttttggagatgttgattagggtggaaaagggacgcgttatctaaaaagtccaagtagtaactttaaccttttaacactaactttggccccctgccgcctctgacacccccagatgaggcagcagtgaaagtgaacggggaagccactgttctgacaacgcacttctctaaacttccatggccatctccacaggtgagctttgcttccggagggttattttctccttaagaatcctcccgttttcttacccttcacattcaagccacacttatttcccccacttagcaagcgaggttacagttcttaccacatgggattgttgtaaatagccaggtgcatagggttagaaaggtcttctaaatttagtctgaaactcagccaggttagttcctcttaactttcaaagcccttgttgatttatagctgtttcacatacatattccccatctgaccaatgattaagcaggtttagaggctcaggtcaataaatagcagaggaggagttaaatgtctttgcagtatctaagcagcacctgttatataaaaccctttagtgttaagatgttgctgttgctgctggtggtaaacacctttaatcccggcactttaaggaggcaggggctggctgctctcttgagttcaagaccagcctggtctacagagcaagttccaggacagccaaggctgtccttctttttgtaatgctttttataattgtcaggtgtctacctaatttctttctattgtgtggtgagtacattataagacctgactcatgacaagttttcataaaagatttaaccatgctctatagatgtttggtctcttccttagtaaatgagttgacagcattgatgttaaacattctttctgaatttggtccatcacctcataggaaacccagaggatctgtgagcaagtccgtattgccatcgaggaaataattatagtgtattattcacttcctaaggaccagggtaagtgaccgtacacggtagtgttgtattcatgggctagggctttgctaaggtagtagactatatcctgacatgtaaacattatatgtttatcttcagggtaatattatatatttatatgtaagtatattatccatgtttgtttctcttcattttgagcatgtgacttttcctgtgaaataaaatcgaagataattttatatgtgagtgagttttgtgacactcccttatgtgaaggtacagatgctatgtaactgtgactttccatcgtgtgtgtgtgtgtgtgtgtgtgtgtgtgtgcaggtacacacatgggctctctccttctaccgtgggttcctgggattcaactcagatcatcaggcgtgtgcagcaagtgcttttacctgctgagccatctcaactggctgttacatttttttattttattttatgggtatgggtgctttgtctgcatgtgtgtctgtgtaccacatgtatgtggtccctgctgaggtcagaagagggtgttgggtcccctggaactgaagttacagtgtgtgtgctgctgtgtgggttgtggaacttggccctgggtcctctggaagacactaagttctcttcagtgctgagccatgtcttcagcccctcaactgaccctttataaaaaaaaaaatcatctattatttgtgtctgtgatgtatgaagatgcacttgttcattcaggtacttatgcatgtgtatatgagtacacatggaggccaatgtcttgtggttttggagttcactgattccccagggagcctcctagctctgctctccctgcactggcatcatgggaacactcgagtgtgtcggcctttctcacgtaggttctgggaactgaactcaagacatcatggttatgtagctggcactttcccaaatatgccatcttctcagctcctcattcctcttctttttagtccattctaattcctacatatgtttgctggatcccagctccatacccatacccaggccatcccgaccctcctccacctagcattacatcataacctattgcaaaccccttcacaagttagcgtaccctggcccgtagatttatggcgtcactgaagctctacagagagaatcaatgaaagcataacatagtttatcagggttactaacacatgctttacacggccagtgttttgctcacaattatcaaagggccggcatccttaatgaatgaatacaattggaaagacttgctccaaaactgttggagaacagctcgaggcagtggcaaaagggtcaataaaatgacctgagaatctaaggaaggtttaagcctcgcactgaagtgtgatttaaagcatgtgggtatcagttaccgcgtggttctcgaacactccagaaagtaggtggtgacatttgaaatgaccgggcaggcaacttcgagtttgggtttggccataggaatcaccctgagaaagctggtacggaatgctgccctggacatcgtggacggcatggctcagctcctggaagtgcttcttactgctccatctcagaggtagtgggtgctgcagtgtgggctaatggttagtggggttccttcactcagggagggaaaattggccctcacagcaaagtcactcatcttggaccttattgggagacagaaacctaggttattgatatgtccttgttaattcctttctccagcactgagaatggtgacctgatttcctgcaatagtgtctcagttgcatgccaacaggtgcctgagatcccaaaaggtgggtaggagtaaactattacctgctggccagagcagagaggcctctcgggtctagcgtccagctgtgccttatagatatattttaatttctgtgaagactttagtgaaataacatatagtttattttcattgatattaattgattgatttaatactttttgccattccttatgctcatgtttggtttggttttggcagtgctggggattgagcccagggtgtgccagtcaagcgctgtgccactgagcacaactgttcaattcagacgactcctcttactgtggctctctctctctagttgaacagatagttgctctctctagttgctctcctattactgtgccaggaacagcatgggtgagctcgctgaaagagctataaaacagagccaggcagactgagagtggctatcaagaggatgtggtaataaacactatgagacagttttaggtgaaattaaaaagcctgtttaacccactttctaggcagagggtgtaataagagaattaaagcagtgctggttgccctttgtggtcttaaggaaacggtcaggtttctcctctaattctagtgcttctgattcttcactcatagataacaaagccgcagcccttttgatgctgaccaagagtgtggattttgtgaaagatgcacatgaagaaatggagcaggtgagggcacttacccatctttcctgagaactgatcataaaggcaggggttgcccgcaacttgactgaatagtcccacactcactcctgtcctgccctctgtctcccacggtgtttggcttgtttctcattgcctcctctgttcattgctggacaagcagaatgagaatgttggtttctaaatcgattcagttttgtagccgatatagcaaagcaggtggctgatggtggtggtgtgtttgtattcgcaaatatgatggtatgtcttaggctgtagaagaatgtgacccgtacagcggcctcttgaatgattctgaagacaactccgacagccacagtgacgaggatggtgtgttagggcttcccagcaatcgggactcatactggtcagaggaagatcaagaactcataatcccgtgcctggcgctggtgagagcatcccgagcttcgctcaagaaaatccggatcttggtggctgagaatggaaagaaggatgaggtggcccagctggatgacattgtggacatttctgatgagatcagccccaggtaagcgtgggttgctcctgggaaaacaggagcattgggatctgagctgatgcccttgctccagggctgctcccagctttttgtgttttgaaaattttcaagcctaaaggaaaattgaaaaaatacttgagtcagtagccgaacatcctttatttggcttctgttcacctttcccccgtgtatttatttacttcttgataagtaggatgatatgcttttcctaaatcataaaggcataagtgacttttcacctgtgaatattttaccagccacctcctaagaacagacatggagtcacattcaagaaatttgacattcgatgtaataataaaactaatgcttagatttctctatttgtctcaaaatgtcttaactacattctgagtttcattaagatctctttctacatttgcttggcatttaatttcttacaatcttaaatagtctctgtcccttgtggtctgacttgacattggcatttcagaattacatatggtagctacacaacaatttggatttatatttatatactatgagaatattttctcatagtagtaacaaagttaaacattttgggtcaaaagttagcgtgttttgtactttcctttatatcctgctggggaggcacctgatgttaattttcctgcttagtagtaataaatgtagtcacatggttaaaagtagtgtcctcttctgaagaggtccttttgcctaacatgtttagtttccattgatgaactctgtcagtatcactgaactgatggttttgaatcctcatatctttgacagaactaattccccatcctgtgaaccacgcacgtttcccccccagcttcctaaatagtacatgtttatcccagtaaacattggttgagttgcttctgcattgcatgcctgcttaaattaaggaactgagttggttgtgtgctgggaacagccacgctgagctctgccccctttttgtggttaatggttccgtctgtctgcttcttagtgtggatgacttggttctgagcatatacccacctgtgtgccacctcactgtgcggatcagtgtaagtaccagctttcattagtatttatagagcatttatatcgtcaccaaacttgtgtgcagataaaatatcttcatagttcttgtttgtatttggcttgataaatactagctggactcttgttataatagccatgtgctttgatactttaattctttttatttttaaagattgatttatttattttatgtatatgagtacaccattactgtcttcagacacaccagaagagggttacagatcccattacagatggttgtgagccaccatgtggttgctgggaattgaactcaggacctctggaagagcaattagtgctcttaatcactgaaccatctctctagcctctgatattttaattcttttagaaccacttgaataattgtttgaaaaaatgtccaaacatcttagaaagcagtgcattaaggagcaatctttgaacattttttatttatctggggaggagaggcatgtatgcccatgtttgtgtgcaggtgaatgtgtgcacactcagaggctctgtcactcttcctgattaccctgagacagttcactcactgaacctggagctggtctggcagcaagcaagcccagcgatcgccttgcctctgtgcccacagtgcaggggtaacagatacacgcatggtcatacatcattttttatgtgtgcttgggtttgaattcttgtccttatgcttgcaaacactcttagccacgagatctgattacactgaatcagtaccacaatatatattttgtatgtataatatacatatgtatttgtggtttgattgtattcttgaaatgctgtaactttatagttctgtttgtttttaatgacctccagttcatctcactgatgtaactggcagggaggtgatcctgccaagcaacttacattttacaagatgtattgctttcaatatttgataagatagatggcggaagattgattaatgtgcagaactcttcaggatggcaggttctttggaacattaacttttttggcattaactttttaagaactaaattcctgagaaataaaattttaacaagatgttctatcagtgatcccaaatacagtatcatatgaagtaatttataaatttgtatgtgcttatatgcattattttatattgttgccgtaacccatctccacgctctctttgttgtggatatgatggctgggttcagagtagggtctgacacgtgctaagcacggctctacctcaggtcttgagatttcccgtcttcctgtcttgagcttcttaaagttctaaacaggaccgtataccatttctgcctccaagcctgagctattataactgttagggtctccttttaaaaagaaattcttcctgtgtgtaattcaggctgccttaaaactcaccattcttctgcaaggttgaggttatccttgttccaaattaaaaatattaaagatgagctgggtgtggcagcacacgcctttaatcccagcaccccagaggcagaggtaggtggatctcttagtttgaatctagcctggtctacaaagtaagttccaagacagccagggctacatagagaaaccttgtctcaaaaaacaaacaaaattaaaactgttgaaaacatataaatgttatgccagtggtgttcctaagatcttgttaaacagaaaagaacctagtcagcattttaaatttcattcattccttcattcattcatccatctatgtattgattgattgattgtgtgtgcatatgtaagtcacattgtatgtgtagagacctgagtatagcttgtgggcgtccttccatcatgtgggtcccaagaatcatactcaggttgtcatgacagccagcgtgcttacccactaagccatctcatcagcccttatcagtcaaggcttttttttttttttaaacatgagtgctggaagttcaaactcaggtaggtcttcaggtcttcatggttttagagcaccaaaacatttcctccacccactttaaggctctttttaaatgattctgttatcatcattaattgtatcttcaagttctcctttcttttggtgccatggctcagagtgaatgttatctctgttccttttctagtctgcgaaattggtgtctgttttaataaaggctcttgaaattacaaagtaagtatgaagacttctccctgtgtgttttgagactaaaatcatctgcccagctattctgccccatttcagaatagcatgcgggtatgggtaggggtgtggagcagccagtctgtgaaggggaatcccttcttaccgtagtttcttctctgtgcctcctgggaatgcttttcccttcacgccgtgttaacttgatttttttttttttctgttttattccagagcaagtcacgtgagcccccacccaggagatagctggattcctttactcattaatgccgttgaccattgcatgaacagaattaaggcgctcactcagcgtgcagctgaactgtgagcctccaatccctactcttctttctcccctctctctcacacccacgatccagtgtctgctttacctatttattttttaagtttttttaacgtctgcttttagaagtggagctttgacagggtgtttgctcgatagaaaggcagcctctgtccttaagaagagattgttaccaagactccaggctaggagagattgcagttatccaccaatcatacagtgtgctatgcttctgtgctggacacaaatttctataaacttgtgctctgagctgttttttggaaatctttaaggaagttgacttgttctctagtttactacagtaaagcatattgttttattaagattttaatgatctcaataaattgctaacctgctgtgattaaatgtgtcatttaatgtgtcctctgaagtgtcatttaaaatcttctatcataagccaggcatgttggcatatacctttaatcaaagcactagggtggcagagacaggtagatttctgagttcgatgccagcctggtctacatagtatattccaggacagccagagctcacagaaagaccctgacttaaaaagtgtattttaaaacctaaaatctctttttaaattcagtttctaaactgtgggctcctgtaaaatcaaaaataagttaaatactttcttacttcaagatggaagaaccagggtacagtcacaatctgaacaaagcaaaaccacactccatcagtgcaagtaaatccatgttctatatctgggatttactctaatttgagttcaggaactctaaccctgccacaaactgccaagcctcagctgctcccatgacacattcacaccttcaaaaacagcaccacttgagtaacttacatcaccaagtctggctgccagcacaaggcataactatggctgcccctggaacacagcttctgtgtgttgactctgaggaagctggtctcttcttaatcgcagctaattcttcagccccagctgaccagcatctcttatcccagcaaagcaagggttttactttaatggttctgttcttttgttaatcagatccagttcttcagctccaggtgagcagacaccacagacttcttcccaatatgaccccatggagtctttacttccctttgaaagttcacaaactttccactgtcttcattgctttcaataatcttatcttccaagcccttacagaacatcctactgagccctcagcactcaatgacttctagcccaaagtttcaaagnnnnnnnnnnnnnnnnnnnnaccaagactccaggc

SEQ ID NO: 3337 - DNA, 2441 bp, Mus musculus
agttgaaagccaacaataaagaagtaggtttgataaattaaggccacgactagactctaattctgcttcaggcaatagaaaaagttaatttacaagtatactacagtgccacaataccataacaagtacatataaaatcagattaaggaaaaagataatttccacaagataaggaatcctgtggggttatgttattcgtgaaggagccagagtgagccgcccgtcgcatttgtactttaagaggcgtcctgatactcactttgattctcacaagcaccccgcacgcacgcaaggtgtcattaacttcgctttacaggtgctgaggtcgcaccacggtcagggatgccagaccctggaggagccaggtggcgagctgcctccctgccaccccctcgcttggctcttcctggtcctcactaggttgtcaaacgccgggcaaccgggctgccgcggcgcggaggcctgggctgaggcgagttgcggaggcggccggaggccacagaggccggaagtgcgggccggagcgctccggggctgcgccgagatggcgagaatgctggcggtccgggtggtggcagggctggcggcggccgcggtggccgccctgctgttggagcactacggcctggctgggccgaccacgccgctgccgaagcccagaggctcccagaggccgcaccccgccccgggctcggaagccaacaacatcttctgggggctgcagatatccgacattcacctgagcagatttcaagatccaggcagagcgctggccttagagaagttctgttcggaaactattgacatcattcaaccggctcttgtcctggccactggagacctgacagatgccaaaacaaaggaacacttgggatccagacaacatgaagtagaatggcaaacttaccagagaattctgaaaaagacaagagtcatggaaaaaaccaagtggctggatatcaaaggaaatcatgatgcatataacatcccaagtctggagagcatcaccaattattacaggaagtactctgctgtgcggaaggacggtgcttttcatcacatccacagcactccctttggcaactattccttcatctctgtggatgccacccaaaggccagggcctaagagaccctataatttctttggcattttagatgagaaacagatggaggaactcgtagagttttccaagaaaagcagtcagagcaaccagacgatttggtttggccactttacaacatcaactatcatgtctccatccccagggatccggacagtaatgggttccgctacagcttatctgtgtgggcacctccatacgcttggtgggctgatgcctgttctgcacacccgtcacttcacaggcacgctggaacttgaggtgggagactggaaagacaacagaaggtaccggatctttgcctttgatcacgacctctttagctttgcagatgtaacctttgacaagtggcctgtggttctcatcaccaatcccaaatccctcctctatagctgtgctaagcatgagccgctagaaaggctcttccattccacacacataagagtattggccttttccttatcccccatcacttctgtcactgttaagattgatggaggtgatataggccaggcttctcacttgtctggtcctattttcatactgaagtggaaccctagaaactacagtaatgggacacataccatagaagtattcgcccaggattctgctggaagaagtaggactgctcaccacatattttctgcccaagaggatgctcatctcacatttgatcctttggcatcatttatcctccttactgaccactacattgtggcccgggtcctgtttgtgttgattgtgctgatccagctcaccacactgattacattcagatatctagcatacccagagcttaaaggaccgtggtttgttggtgagataattgatggcaaattgggttgctgcttttcatttgggatatttgttgatggacatttcctgcaaggtggtctaacatttataaatggaattatacagggtcatcctgtgaaaagcatccagcccgaacttggagttcaggatgtcattttctgcctagggagcctgtggaaacttgtcctggacctttactgctcctgagacttgacttcccagcctgtttccccaccgatcatgggctttctgcttccttagccaaggttgttttcaactaatcaaataaatgaatgaatggtagccataaacaatgggttggagagatcagtggttaagagcatgtactttacctccagaagacccgagttcaatccctagcaaccatgtcagatgctcacaactgcctgtaactctagctccaggccagagccactgtgggcacctacattcatatgtgcacagacttacatgtgattaaaaaataataaaagataagtat

SEQ ID NO: 3338 - protein, 653 aa, Mus musculus
GILWGYVIREGARVSRPSHLYFKRRPDTHFDSHKHPARTQGVINFALQVLRSHHGQGCQTLEEPGGELPPCHPLAWLFLVLTRLSNAGQPGCRGAEAWAEASCGGGRRPQRPEVRAGALRGCAEMARMLAVRVVAGLAAAAVAALLLEHYGLAGPTTPLPKPRGSQRPHPAPGSEANNIFWGLQISDIHLSRFQDPGRALEKFCSETIDIIQPALVLATGDLTDAKTKEHLGSRQHEVEWQTYQRILKKTRVMEKTKWLDIKGNHDAYNIPSLESITNYYRKYSAVRKDGAFHHIHSTPFGNYSFISVDATQRPGPKRPYNFFGILDEKQMEELVEFSKKSSQSNQTIWFGHFTTSTIMSPSPGIRTVMGSATAYLCGHLHTLGGLMPVLHTRHFTGTLELEVGDWKDNRRYRIFAFDHDLFSFADVTFDKWPVVLITNPKSLKCAKHEPLERLFHSTHIRVLAFSLSPITSVTVKIDGGDIGQASHLSGPIFILKWNPRNYSNGTHTIEVFAQDSAGRSRTAHHIFSAQEDAHLTFDPLASFILLTDHYIVARVLFVLIVLIQLTTLITFRYLAYPELKGPWFVGEIIDGKLGCCFSFGIFVDGHFLQGGLTFINGIIQGHPVKSIQPELGVQDVIFCLGSLWKLVLDLYCS

SEQ ID NO: 3339 - DNA, 71799 bp, Homo sapiens
gtcctgtgagtaggtcatactctcctggccccgatgtcttcccctgcttaatgagaggcatctcctggctccacagtatagactgtcaggacttgactacttgactatcctctaaagagaatcatgatcaagtcccaagttcttggataaaatgaatttgtcctagattatgggaaaacacattgtgtgtgtgtgtgtgtgtgtgtgtgtgtgtgtgtgtgtgtgtgtgtgtgtgtttaaagactacttcagaaaattgagaaaatgtaaatgatgtgcaggtaggactttaataaatataaaggtaaaaatattataaatatggtattaagcatttggaattggaggtttccatttgtaaaagttgccaattatttttacagtttctagtaaaatcatatcccagcttcctgttactctttcatttgcaaaggtgatcattcttagccttttattcatcttgctcattgactagagttcccagattatctcgaatgggactggtatatcccttgtgtagaaacgttgccttccttttttttttttttttgagatggagtttcgctcttgtcacccaggctggagtgcagtggcgtgatctcagctcactgcaacctccacctcctgggttcaagagattctcttgccttggcctcccaagtagctgggattacaggccttttaagattaaagactgtttttcattttgcttaatctttggactgctggtaatgtagatattgagaacccttgagcatgactttaaaatggcagcaacttgaatcttgaagtattggaacaccggtgtaaacatgaaacacctttacacccatgtatggatgtgccattttattttctatgactcttattgtggaacctttactgtagtttgtttctggttttcttctattataaactttgccttcataaacatgcctattggtaaatctctccacacacatctttccttaggataagttattctaagtacaaataacaggtcaaagaaatgtacattttaaaacacttcaggctgggcgcggtggctcatgcctgtaatcctagcactttgggaggctgaggcgggcggatcacgaggtcaggagatcaagaccatcctggctaacacggtgaaaccccgtctctaccaaaaatacaaaaaaaatgagccaggtgcagcggcaggcgcctgtagtcccagctactcgggaggctgaggcaggagaatggcatgaaaccgggaggcagagcttgtagtgagccaagatcgtgccaccgcactccagcctgggcgacagagcgagactctgtctcaaaaaaaaaaaaaataaataaaataaataaacatttaatggagaaaaatagagaaatagagtgtatacatttattattattttgagatgcagtcttgctctgttgcccaggctggagtgcagtggcatgatggtggctcactacagcctccgcctcctgggctcaagtgattctcctgcctcaacctctcaagtagctgggactacaggggtgcaccaccatggccagctaatttttttgttaagaccagcccaggctggtcttaaattcctgacctcaagggattctcctgcctagacctctgaaaacactgggattataggtgtgagccactgagtctagccttttcctgaatttttttttttttttgagacaaagtctcactctgtcacccagcctggagtgcagtggcacagtcttgtctcactgcaacctccaccccctgggttcaagttattcttctgcctcagcctcctgaatatctgggattacaggtgtgcaccaccaggcccagctaattttttgtatttttattagagactaagggtttcaccaagttggccaggctagccttgaattcctgacctcaaatgatccgcccacctcagcctcccaaagtgctcagattacaggcacgagccattacacccagccttcctgaatatttttgatccacagttggttgaatccacagatgcagaacccatggatatggagggccgattgtacatccatactgtaaaaccatcactactatccatctccagacttttttcatcttgcaaaactgaaacagtgttcctattaaacattaactccccatccccacttcctcccagtctctgcaaaccaccattccactttctgtctctgtgaatttgactactctaggtaccttatataagtggaatcacacagtgtttatctttttgtgactggcttatttcacttagtataatgtccttaaggttgatccatgttgtaataagtcagaaattccttgatctgtgatttttttacttttgcaggtgtttcaggtttcttgtaaagagcattgattacctagatgaaattcttcccaaatttctgttttgttaaggaataaaaggagtgctccctcaaaagcttaaaaagcgtatatacctaaagtaaaatagttcatcctaccataaaaacacatgcatgcaaatatttactgcagcactattcacaatagcaaagacatggaatcaacctaaatgcccatcaattgtagacaggataatggaaatgtggtacacatacaccatgtaatactacacagccataaaaaagaatgagattatgtcctttgccgcaacatggatggatctggggaccattatcctaagcaaactaatgcaggaacagaaaaccaaataccatatgttctcacttaaaagtgcgagctaaacaacgagaacacatagacacaaagagggaaatgacacacacggacctacttgagggtggagggtaggaggagggagaggatcagaaaaaaaaataacctgttgggtactgtgcttattatctgggtgactaaataatctgtacaccaaacccctgtgacatgcagtttacctgaataacaatcctgcacctgtacccctaaacctaaaattaaagttaaaaaaaaaagctttaaaaatgtctagtacacaccagtgttcattgtagcatcatacacaatagccaaaagaggaaaacaactcaggtatccatcaacagatgaatggataaacaaaatgtggtctatacatacaatgcaatattattcagccttaaacggaaggaaattgtggcacatgctacaacatggatgaaccttgaagccattatgttaagggctgatggttgcataacaatatggatgtacttaattgcactgaattacacaacgtctcactctattgcttgggctggagtgcagtggcgcaaaatttcggctcactgcagccttgatcaccggggtttaggtgatcctcccacctcagcctcccaggtagctgagactacaggcatgcgcccaccacaccctgctaattttttgtatttttagtagagacagggttttgccatgttgtgcaggctggtctcaatctcctgggctcaagcaatctgcctgccttggcctcccaaagtgttgggattacaggggtgagccactgtgctcagcctattttaccacagtttaaaaaaataattaaaaataatcttaatcccagcactttgggaggccgaggcgggcagattacttgaggccaggagtttgaggcgagcctggccaacatggtgaaaccccgtctctactaaaaaatacaaaaattagccgtacgtcgtggcccacgtctgtaatcccagctacttgggaggctgaggcataagaattgctggaacccaggaggcggaggttgcagggagccaatattgtaccactgcactccagcctggacgacagacagacctagactctgtttcaaaaaacaaacaaacaaacaaacaaacaaactttatatatatgcaacctattttaattacattactttagctctctatataaatgacttcacaaaacgatttaatactatatttttgtatttttaacaaagtcagtaagatagtgatttgaagacaattatggctgggtgtagtggctcacgcctgtgatgctagcaatttgggaggccaaggcaggtggatcacttgaggtcaggagtttgaaaccagcctagccaacatgaagaaaccctgtctctactaaaaatatttttaaaaattagtcaggcatggtggcgggctcctgtaatcccagctacttgggaggctgaagcagaatcacttgaacccaggaggtggaagttgcagtgagccaagatcccataattgtactccagcctgggcaacaagagcaaaactttatcctccgccccccgaccaccccccctcgcccaaaaaaagacaatttctgcatcttatgtttatgagagtcacttaattcaatatatggctgttggtgacaatgtacgttgtactgtaaaatgtctgagtgatacattctcccttgactttggttctaggtaagtttgctttcatggtgaattgctgcctgctttctttataagaagaactctatttacctttctgctttgactgtcaggaactgagacaccttttatgctgaattgaagtgattagctggtcaaaccagtatttccctggagaatcattaaccatcattaaataaataatatcctgttcctattcactttgaacaccatgagtgaagtggcttggttggagtacagtgtctgaaattgagactgctggcttttgtgactttggaccttgtccaaatactttaacagcatgattcttcctcttgttgtgccccatttctagaaaatgatttcctgtatctttgaggtttctctaatgttacgggaagtcagggaccctaaacggagggaccggctggagccgtggcagaggaacataaactgtaaagatttcatggacatttatcagttcccaaataatacttttataatttcttatgcctgtttttactttaatctcttaatcctgttatcttcataagctaaggatatacgtcacctcaggaccactgtgataattgtgttaactgcacaaattgattgtaaaacatgtgtgtttgaaaaatatgaaatcagtgcaccttgaaacagaacagaataacagcgatgattaggcaacaagggaagacaaccataaggtctgactgcctgtggggtcgggcaaaaagagccatatttttcttcttgcagagagcctgtaaatggatgtgcaagtaggagcaatatcactaaattcttttcctagcaagaaatattaatattaatatcctgggaaaggaatgcattcctggggggcggtctataaacggaggctctgggagtgtctgtctcatgtggttgagataaggactgagatacgctctggtctcctgcagtaccctcaggcttactagggtggggaaaaactgccctggtaaattagtggtcagaccagttctctgctctcaaaccctgttttctgttatttaagatgtttatcaagacaatacgtgcaccgatgaacatagacccttatcagtagttctgcttttgccctttgcattgtgatctttgttggacccttattagtagttctgctttttgccctttgaagcatgtgatctttgtacctactccctgtccttacactccctccccttttgaaacccttaataaaaaacttgctggtttgaagctcaggtgggcatcatggtcctcccgatatgtgatgtcacccccggtggcccagctgtaaaattcctctctttgtgctctttctctttatttctcagccagctgacacttatggaaaatagaaagaacctatgttgaaatatcgggggcgggttccccatactctaaggtttttgcaaatgcattttacatatgccacattccttgggttttaaattagatcatctcaatcatgtctcccaaatttggttttaaaatatccttccacatgttttctagtggtgtagtattagataaaaccaaaaccaaaattttattttattgatatgggtaatgctctccattcatacattacagccctggtccctcagtcactaggttccacattttggcactattaaaaaaaaaaacaaaacttttattttcttcccttgaatatccaatcaggtgccatgttctatagtttttatttttaaaattattgttacatctgattattcctttctaatctcaatgttgtattctcccatctttcttcttcaggtctttgtaattaccccactacctggattattgcaatctccttccaacaggattctctctcacacctatcctctggacagccagttctctatgccgttgccagatccatcttgccaaagcagaactctgttgtcttcactcttggcatttacaaaggccttcctcaatgtgcctcaagccaagggtctggtctaattaccattattcctcttggcatagcctagccaaactgaaacactcactgtccctgcaacatgccctgcattttctcatcttaatgctttggttcgtgttgttaggtcttagtgcaaagtgcttttacccaccccaacctcaatctctgccagtcaagaaatattacccatcctttatatgtggcctccataattaaacttttcttgattctttccaaagatgtactgtctcctagtttgttgttgcttttgttgttgttggtggtggtgtttgagacagtatcttgctctgtcactcagtctggagtgcagtggtccaatctcagctcactgcaacctccacctaatgggttcaagtgattctcctgcctcagcctcccgagtagctgggactacaagcacgtgccaccatgcctggctaatttttttgtatttttattagagacgggctttcaccgtgttagccaggatggtctggatctcctgacctggtgatctgcacgcctcagcctcccaaagtgctgggattacagacgtgagccaccgtgcccagcttctctctcctagttttaaccttccccctgccttttatatctggtcatctcttgtggcaaaaagcatattcttcatatattaaacttacttatgtatgtctctctcctacataagctcttaagataatgaactatagctctttgcctacttacctttatgtttctttatgttttctgattagatcaatgtattctattccaaaggtactccaaaatttaattgaaaattttaaattgaaaattcaatttaattgaaattggcataaatccaatactgacaacatgccccaaggaaaaaactcaaagggagttttttttaaagagcactacttgtgtaaaaatattcactcagccaggcgcagtggcttatgcctgtaatcccagcactttgggaggccaaggcgggtggatcacgaggtcaggagattgagaccatcctggctaacatggtgaaaacccgtctctactaaaaatacaaaaaattagccgggcatggtggcgggtgcctgtagtcccagctactcaggaggctgaggcaggagaatggcatgaacccgggaggtggagcttgcagtgagcagagatggcgccactgcactctggcctgggtggcagagcgagactctgtctcaaaaaaaaaaaaaaaaaaaaaaaaaaccaacatatatatatatatatatatatacacacacacacacgtgtatacatttactcagaacaggcagaagcggataagatggcagcagcaagcagctgatcagggtgggagaaccagtggtagtggaggcagtagtggggctggcggtggttccaggtgcggcacaggcagtggccatagcagcttgttggataagtggaagacagatgataagcctgtaaaaattgacaagtgggatggattagctgtgaaaaactctttggatgattctgccaaaaagttacttctggaaaaatacaaatatgtggagaattttggtctcattgatggtcgccttaccatctgtacaatctcctgtttctttgccatagtggctttgatttgggattatatgcacccctttccatagtccaaacccattttggctttgtgcgtcatatcctattttatgatgatggggattttgaccatttatacctcatataaggagaggagcatctttcttgtggcccacaggaaagatcctataggaatggatcctgatgatatttggcaactgtcctccagtcttaaaaggtttgatgacaaatacacctctaagctgaccttcatcagtgggagaacaaagcagcagcgggaagccgaattcaccaagtccattgctaagttttttgaccacagtgggacactggtcatggatgcacatgagcctgaaatatccaagctccatgacagtctcgccgtagaaagaaaaataaggccgggtgcggtagttcacgcctataatcccagcactttgggaggccgaggcgggcagatcacaaggtcaggagatcaagaccatcctggctaacacggtgaaaccccgtctctactaaaaaatacaaaaaattatccaggtatggtggcacgtgcctatagtcccagctactggggaggctgaggcaggagaatggcctgaacctgggaggtggagcttgcagtgagtcgagatcgtgccactgcgctccagcctgggcgacagagcgagactccgtctcaaaaaaaaaaaaaaaaaaaaagaaaaataaaatagccaattctaaaagtagccctctttctgttggatcttgctgaattactggtttgtggggtgggggagataaaaagaatttaaaatggataaagtaaaaaaagtttaaaaatccctgttttgtcctgaaattttagtctgttctggataaataggattttctgagagagatatgagaagttgtagctctgatgtctagctgtagtctcctgggtctgctgattgcattattttaatttgcttttctgggaaagcagttttgctaaaagctgtacagactttcctttgtacctagtagtactttatatagtatagctttgggctatgtagcattttaagactcaattaataaaaaattaatctgttgctgactctgttaattcctatttccacatgtatttccttgaagaattcaggatacgacttcttgtgtatgacagttttccttcacacactatttttgtgggtgtgtatatatctgatttggggagaatttaaaaaacacatagctttttaatttgtttgaaacagaccttttgcctgttacattttgtgctcttaaccaattaaagaagccaatgacatgttagttttatattgtgttttccactagtatatccctgttgatttgtttgtgccttttattaactgccattttctaaaatttttttcaataaagggaagacgtgaaaaaaattactcagaacagcaatatataataaacaattaaaaaatcaacaataagggagttgttagataaattaaggtagggctgaatctaattctcctgggtctggcccataggaagtatttaatacttattaaatgaatggtatactaccgtgttgcaatattatttactcaggtgcatgtgaaatcagtttaagggaaaaataactttcacaaaacataggaattacatctatagaaaacctatgctgccgggcgcggtggctcagcctgtagtcccagcactttgggaggcggaggcgggaggatcgcttgaacctaggagttccgaggccagcccgggcaacacagacagatcccagtctctacaaaaactatatttaaaaaattagctgggcgtggtggtgcgagcctgtaattccagctacttaaggtcagggaggtcgaggctgcagtgagccatgatcgcgccactgcattcctgcctgggggatagagaccctgtctgagaagtgaaggaaaggggaatggtagagggaaggggaagagaaagaaaagaaaacctatggaggtacgttaataatcagaaggggccagaggaagccacctgacacatttgtgagacaatttaaaaggcgttctcatacattctcactttgatacaacaaccctgcaaagtgcgcacggaaggtgttattaactccgttttacaggtaaggagatcgacccactgaggtcaggagtgactgaccaaggcggagccaggactctagcccccgcctcccggccactggtcccggtctccttccccgccaccactcggccaccgtcattggtgttcagagtttcggttctcttttctgtgatcgtattacttatgcaaaacgagcccagtcacttgcgcggccagagaggggcaggtgctgggcggcggctgacgggcgcagcaccctaggcccagtgtctggctccagccccgcatccggcgccggccccgcatccagctctggccctgcgacaatagagtccggaagtgcaggcaaagcggctcccgggagcgccgcgcggtcctgcgcgggatcagcgagggccgcgccccggcgggcgggcggcatggctgcagtgctggctctcagggtggtcgcggggttggcggccgcagcgctggtggccatgctcttggagcactacggcctggcgggccagccctcgccgctgccgcgccccgcgccccccaggaggccgcaccctgcgccagggcccggagacagcaacatcttctggggcctgcaggtgacgcggcgggaagccgggccgggaggcaggtgcagatcgggcaccgtgcggtgggacccttgcgggtgttgggccccacgctccaggctggggacctcagtcagattgtaactcgaggctctgtctagtgctggccctgtccttacctggggggttcgttatgcattgcctctttgccttttccttctgcccgagagagccgctgagccgcccctccccatgctgcctcttcctggctcagatctctctgttcaatacctgttttcggcagatatccgacattcacctgagcaggtttcgagatccaggcagagcggtagacttagagaaattctgttctgaaactattgacatcattcaaccagctctcgtcctagcaacaggtagggaggcttgccgtgctgtggtggtggtctgtggtccgcatggtagaactctagccagggctgtggcttttcattttggggacgttgggagcagtatagccacagccccaggtgagctctgtgaggtggaagagattggacattctaacccctttgcctatggataactgaatgagtcaagatccaggcaaaatgatttgacgtagcaaggttttgtcaaagcagtagaagcaaggctcctggttctcatgtcagtctgttgtctgatatatttgtatctggtttttgttcttgttgttgttacagttctggttgtgagaattagggaaaagcctgtaaccacgaatcagaagttctcttcttttgctaacttttctattttctttacattattaatcttatattttcagttgtttgaggcttccggtgacccagggcactttttcttcatcctttgatagttttatgacttaagttttctagactcttcaaacactttatttgctttcaaactgtaatggggagaagaagctaaaggagcatctatctatcttgcttactggggaattcatcactcatccaccttattgaagcatctctgctgacatgaaagggtatcagttctgatttaatggatgagcctccataaaaagttttctgtttagttctctataaattttggtattttgttgtccaattccacctgccacattgcttcttgctgtaaaaataatacttggtcaaatcacatattctgattttgtggtttggaaaatatggttgccatagatattaggcagccactcagagtactggaatttcttataaatcattttcattttatcagagtctattgatgcattttgtactgttctctttaaagatttttttaacaacccatttcgaatatcacaggagattgaacaggcatttgctaacctataagaaacaaagtccttgctgagaaaatcttgttagtttagatggctcgatttggacattggtggtctcgtgagcagttatgcttatacacgttgagtgctttaagtatccttgttccttcagtgtacatatctaaaaaaaatggaacccccagtagtttattttgcattgtgattcaattcttgtgtaaacctacaggagacctgacagatgccaaaacaaaggaacagttgggatccaggcagcatgaggtagaatggcaaacctaccagggtattctgaagaagacaagagtcatggaaaaaaccaagtggctggatatcaaaggaaatcatggtaagagccaagagccagatacaataaagacaagagtttttttcccccttcaggaacctagattttccaacttagattgtaaaattataaagtgggacatttacatatactaaaggtcacatctctgaaatacaactatataatgtggttttaaaacttcaaatgtcattgttagcctttgagatgacaattggtatggtcctttttttgtgacatatgctgcttctttttttattattattattatactttaagttctgggatacatgtgcagaatgtgcaggtttgttacataggtatatatgtgccatggtggtttgctgcacccatcaacctgtcatctacattaggtatttctcctaatgctatccctccccctgcccccatcccccagtccttttttctgtacatggaaaaaatatgagttttagcaaaactcatgcagacagatgttttaataaatatacattttgctaagtgaaagaaggcaaacccgtaagtctgcatactgtatgatttcatttatatgacattcaggaaaggcaaaacaatagacagagaacagattgtagttaccagaggatagggattgggagagagattaactgcaaacaagcatcatggagaatttttggtggtgatggaactagtctgtattttgattgtggtggtagacttcaggttcactatatatttgtcaaaatccatagaactgtaagtcacaaaggatgaattttactgtgtgcaaattttaaaaacttagcttttattttttctttttaaaatttactagtattattattattattttgtgagacagagtctcactctatcacccaggctggagtgcagtagtgcaatctcagctcactgcaaccttcgtctcccgagttcaagcgattcccctgcctcaacctcctgagtagctgggattacagacaggtaccaccctgcccagttaatttttttttttttttggtatttttagaagaggtggggtttcaccacattggccaggctgatctcgaactcctgacctcaaatgatctgcccctgctcagccttctaaagtggtgggattacaggcgtgagccaccacgcctggcttattattatttttttgacagggtcttgctctgtcactcagcctggagtgcagtggtgtgagtatagctcattgcagccttgacctgagcttaaatgatcctcccacctcagccccacaagtagctgggactacaagcatgcatcaccataccctgctaatttttgaagtttttttttgtggagttgggttcttgctatgttgcttaggctgatctcaaactcctgggctcaagtgatcctcctacctcattctcccaaagtgctgggattacaggtgtgagtcactgcacctagcttaaaaagtttaaattgcaaacaaatctccataggcatgaacagggaaatggataatcctttccctttttaagattatcattgtgttggtaaggaaatgaactcttctccaaaagagtcctgatggtagtgtatttgtttgatttataaaggttgacttttttattagctaagtacttcatttgtctactttatctgatcagtagatcaggcatgaatccacttcttgctggcttttagaatcacatgattaagacaagagcaactacagttcaatcttataatttcaaagttatttattctgagtggtatagaattcaaagtacctgtttttctctagtatactaagtgccttaaataagtttctagataatctgaattttgttaagatatcaaaattttaaagtatcaatctaattgattggcattctgccattaaaagtgttatagaaagatgacagaggctgctacagtcacgccatgcctagctaagtctgtgccagcagaggcagagagcttgcggtgggccagttgcccctgctggagcctcagttaaatctgaacatcccactgtcccaaccctcccacagatgtgcaccgggctgtactttggcttaagactgcaggtggacatctccactgcccgggaatcatggagtgtgtagacaggacagcctccatggaaggctggtcataccagagtcccaccttggcacaggccttgccattgaggcagctctactgtctgtgctggtctgagggtgggctgcctgtcatgggggcagccatttcccagggggtgttcattgccgtcatctgcaacgcctcataggcttcttgctgcttctgctccgagtcattctctgccgggcctacactcttgctatgccaatattgactgtctctacagatttagtcccaactccagccctggcccctatcctgaaaaggtaccactgcccaagaaacctagccatgaaggcagctacctgctgcagccctgaaggcccctggcttagcctggagcttgggacctaagtccatcccacccacatcctggaatcaagattccagggttttagccagactagggtctagaacttggagcctaacctgcttggattggactcagcaaccctgagtctagccatactggttctaggagaggctcagtggccctagagagatgggccatggtgggagttcatgaattgctggtagggccagggccatctggactctgttctgagtcaggggctgagtctaccctttccttaggctaagcacttctaggtgggggaagcaaactgaaacccatggcaataatgggaggttgtccaggatgtgcccctctcctagtcctcccactgtttgctgaataataaatggaacggctctaccctgggggtgtgtgtggaagaattgttatagaaagaattattttcccttagtcattaaagaaaatgtttgtattctttttttaatgtggatgaatgtttgctttttttttttttttaaattagatgcattcaatattccaagtctggacagcatcaagaattattacaggtactgtaataaacagaagacagaccactatgtagagtcagtgttataaggagggtgtggtcaactcaatgaatgagagaaaactttaaaaaaacattttaagaggcaggggtctcgctattttgcccaggctagctctgaactgagctcaaacgatcctcctgcctcagactcctgtgtagctggggctgcaggcacatgctactgtgcctagctgaaaacattttttaacaggtaaaatttttctataaagaatctctagtaatttaaaaaatgagcctttttgtctttttgtgacagatgcatttctttttgtttagagtttttctttcctttaattctttctgtttcatatacaggcatacctcgttttattatgcttcgccttattgcactttgcagatgttgcattttttcaaattgagagtttgtggcaagcctgccttgagcaagtctatgggagccatttttccaacagcatgtgctcacttcctgtctctgtgtctcattttggtaattctcacaatatttcaaactttttcattatatcttttatggtgatctgtgatcagtgacctttgatgttactattgtaattgttttggggtgctacaaaccttgcccatataagtccaggaacttaatcaataagtgctgtatgtgttctgagtgctgcaccaatcagctgttctcccatctctctccctctcctccagcctccccattccctgagacacaacaatattaaaattaggccagttaataaccctacaatggcctctaagtgttcaagtgaaaggaagggcccaacatctctcactttaaatcaaaaggtagaaatgatgaagcttggtgaggaaggctgttgaaaggctttcagataggctgaaagctaggcctcttgagctggagcagtgagccaagttgtgaaggcaaaggaaaagttcttgaaggaaattaaaagtgctcctccagtgaacagatgaatgattagaaagtgaaacagtcctactgctgatgtggagaacgttttcgtgttctggatagacaatcaaaccacctacaacattcacttaagccaaagcctaatccagagcaagatcctaactcccttcaattctatgaaggctgagagaggtaaggaagcagcagaagaaaagttggaagctggcagagtttggttcatgaggtttaaggaaagaagttaactccataacataaatatgcagtgtgacgcagcaagtgctgattgatggagaagctgcagcaagtgacccagaagatctagctaagataattgatgaaggtggctgcgctaaacaacagattttccatgtaaatgaaacagccttcttttggaagaagatgccatctaggacttttatagctagagaaaagtcaatccctggcttcaaaggatgggctgactattgctagaggtccatgcagctgatttttttttgttgttgttgagaaagttgcacaataatttatttagggcctcctctccccacccttgcagtctctaggtcactttttccgcttgtagattttgcgcgccaaccccagaaagatgactgggggcaggggagctgcgtactgttcaatgagacccataacgtggctgtaactgtcttcctattattgcaagaacatggccggcagatccagctcctcatatactgccttcaccggggccaccttctcggcctccttctgcccaaaattctccttcagaatctggtactgttctggagtggcccgttgcagacactgaaccaccagccagctgcatttgttgtcctggatgtcagtgccaactttggcggtcacattggggtccccaaagaggtgagggtaatcatcctgatctgaaagaactctccctctcccatctccagcaggatcttcttggcattggtattctccttctctctatcaatacctgcatatacatggctgcagctacaggaaggtagaaggagtagaaactgccttgtacgtgacactagatttgtacctcttttcagtgaatctgccaagatccacattgccctggggggctatgatgagatccagggtctgcccaatctcagtctgatagaaactctgccggaagagctggatcaggttcaggtaatagggctgctcatggcaatagagcttcagcaggcggtacatacatgcttcccttccagaagcatagcaacattgatggcatccaaacccgcgcccggcttctgatatcagcagatctgtccccagtgggtgagggatgaatccatgatgtcatttgccaccaggaagaaagcttgcagcagttccacacacgagcccatagtcagggcccgctggagactctcagtatcctgtttcctcggctccaccagctcccagaatgctactagcaccatcaaagcccagtgatacttgcctccaatggcattgtactacaggacctccgtgagctgggtgatagcatctcctgtctctgggtgccccatctcatcctcagtcagcaccctaacaatctgggagaagcactgaatgaaatcctgcttttcttggacagaaatgtctgatttctggtctccattcattctgagggaggagcaaagggctctgttcctggatgtgggttcctgctccatagctgatgactttaagtggagccaatgcccacttaccattctgaaaatccttgggtgcttaagcgttatgctaaatctactctgcctgtgttctatatatggaacaacaaagcctggataataatagcacatctgtttacagcatggtttactgaatattttaagtccactattgagaactactgctcagaaaaaaatattcccttcaaaatatcaatggtcattgacaatgcacctggtcacgcaagagctctgaggaagatgtacaaggagatgaatgttattttcatgcctgctagcgcagtattcattctatagccaatggatcaaggagtaatttcaactttcaactcttactatttaagaaacacatttcataagactatagctgccttagattatgattcctctgatggatgtgggcagtcaattgaaaaatttatggaaaggattcaccattctagatgccattaagaacagttgcaattaatgggaggaggttaaaataacaacatgaacaggagggaagaagttgattccaaccctcatggatgactttgaggggttcaagacttcagtggaggaagaactgtaaatgtggaaatagcaagagaactagaattagaagtggagcctgaagaggtgactaaattgctgcaatcttatgataaaacttgaacagatgacaagttgcttcttatggatgagcagaaaaagtggtttcttgagaaggaatctactccttctaaatatggtgtgaacatttttgaaatgacaacaaaggatttagaattatacataaacttagttgataaagcaataacagtgttggagaggattggatttctttgggtaaaatgctatcaagcagcattgcatgctatagagaaattcttttttttttttttttttgagatggaggcttgctctgtcacccaggctggggtgcagtggtgcgatcttggctcactgcaacctccgcctcccgggttcaagcaattctcctgcctcagcctcctaagtagctgggactacaggcgcctgccaccatgacccgctaatttttatattttagtagagacagggtttcaccatattggccaggctggtcttgaactcctgacctcgtgatctgcccacctcggcctcccaaagtgctgggattacaggggtgagccaccgcgcccggccaagaaattcttgtgaaaggaaaagtcaattgatgtagcaaacttcatggttaccttattttaagaaattaccacagccaccccaaccaccaccctgatcagtcagcagccaccaacgtcaaaacaagaccctccaccagtaaaaagattttgactcgctgaaggctcagatgatcattagcatttttagcagtaaggtttttttttgtttttttggttttttttttgagacagggtctctctgtcacccaggctggagtgcaatggcgcgatctcagctcactgcaatctccaccttccaggctcaaagtgatcctcccacctcagcctctcgggtagctgggaccacaggcgtgagccaccatgcctggctaattactgtgttttttatagagacagggtttctaaatgttgcccaggctagtcttgaactcctgggctcaagtgatccactcacctcggcctcccaaagtgctagggtaacaggcgtgagccaccatgcccagtcagtagaagtatttataaattaaggtatgtgcattgtttttctagacatgatgcaattgcacactaaatagactatagtatggtgtaaacataactttttttttttcttttgagacaggatcttgctctgttgcccaggctggagtgcagtggcaccatcttggctcactgcaacctccacctccctggttcaagcgagtctcctggctcagcctcctgagtagctgggactacaggcatgtgccaccatgcctggataatttttgtatttttagtagagacagagttttgccatgttggccaggctggtctcaaactcctgacctcaagtgatctgcctgccttggcctccaaaagtgctgagattacaggcataagccactacgcccagccgtaaacataactttcatacacactgggaaaccaaaaaattcatgtgactcgcttttttgcaatatttgctttattgtggtgtcaggaaccacaatatctctgaaatatgcatgcagtttaatgctttgttttggctaatggtacttttaatattccacacgggcttaaaaaattgtttaagtcattgatacataggaaaagtcatttatatcagagcttgtcagccacactactgaggtcactgggttttcagaatcctgagatactgattctcctggcctctgtggtggctggagagcccagttagtcacctggctgctttatcttttcatcctgtgtcatacaaatattaaaataatctttatttgtcacaaatgtgaaaaggcaagggatctctgaattagaaaccaattgtctagtttcattatgtttagattcctcttttggttgcagtgcacttttcagcctcagggtattcagtagctttgttctgcattgtcaatcaatcatgtagcaaatatttattgagaatccatccctagttggatagtgtgagagatacatgagttaatgttaaaaatttggcttttgccttcaaggaactgatagtgtagttaagggacatcagaattatttaggaaacaattagaaaataacatgaagaaatggccgaggaaatgctagattatttggtacacatgataatcactatgagaaattagaaaagcatgggggtggacatagagaagactttataaaagaagcaaaaagtgtgtccaatcttaaaagatgagtagcatttgaagaagtaagacatgccaaggaggatattttaggcaaaaagataggtatgaagagatctttaaaagctacagactgggaaaccaaaaactgaactttgcaggggcagtaagaaaactggtgtcaccagaattaacattcatactgaggactagtatgacactggataggcagcctagggctaatttatggaggtcttaagtaacaagcatagaagttgagatgtgatgggtaatagttcataattcagcataggttcttaaggaggcaagtaacataattaaaatagtgttttataaatggcaatcccacaataaaaaaggaaaaagatgggataaaaaggaaaaaagagatattggagttatgtggactaaataggagggtcctgcaatagtctagtcatgataatgaaaagtcatacccatctgaactaagttcttggatatggagatggtgacatcaatttgaggatgataggtcaaaaagcactggttaactgagtttgtatgattagagtcaccatacattggaagaggaggttgttctcttttgttaatgtgagaaaggaagaggacagagatgaaaatctttcacttcctgttaactgtttgtatctttcatggtgactgtggggagttaggagacatgttcaaaagtaattaacaggacttggggctgagtggttattgggaaagtaaagtgaatagtcactttaaagtttcttacctttgtatttttgtttttagccacctaaactttatctgaatttaataaatggcattttactaaaaatataaatattacagaaataccaatctgaagaaaaaaaattaaagttaaatcttgatcttaaaaatgtcccagagaggaggcagagcttgcagtgagccaagatcgcgtcactgcactccagcctgggcgacagagtgagactccgtctcaaaaaaaaaaaaaaaagattctgaggaataactgaacataaaataagcaagaaaaaatataagtaaaaattttaatttagaataaaaccctgaaatagaatttttttttttttttttttgagacagagtctcattctgtcatctaggctggagtgcagtggcacgatctccactcactgcaagctccgcctcccgggttcaagccattgtcctgcctcagcctctggagtagctgggactacaggcgcccgccagcacgcccggctaatttttttgtatttttagtagagatggggtttcaccatgttagccaggatggtctcgatctcctgacctcgtgatccgcctacctcggccttccaaagtgctgggattacaggcgggagccaccgcgcctggccctgaaatggaaatttaaaaaataccaagaagaaaggcagtagaactaattgacattgtttaaattgggtttgactaatttctgagtattagttgtaatgtctatatcatatatttactcgggttacattatatttgatggttgttgtggcccactagcatattaaatttcaggagtttatttgtatttttaaatatatgctgttaggtaaaaatcatgtaagacacttagataaatgataataccaacttttcttataatgttctgacatttgaataatataggtatgccctccaataaaatctatactttccttcttatttattcaacacatacttaatgagtgcctgccctgtactgtgttactcatcctttcttcctggtcttcactctgcagttttatggacacctgaacactgttgacgcttaaggtggtaaactttcattagtggatatagaccctgtgtatgttatcaatatatctttaggaactgaaaaagatttaacaacccagacctagactaatattttttctccttgcttgaagacttcatctttgcaagtctttcttgtgaattaagcctctgtagtcctgtttcaagaagtagacagcttttttatctcactacaccaagaattctaggtacttagtatgccctcactaaatctgcaaatgattgataaatactgttccactggattttgatttctttttgaacatttaatggactccctaaaagagccgtcttacttctgaacttggtgaacttgtatttggttattgaatgagtttgcatgagtctttggggacaatgggagaaaaactttgaaatttcatcagtttatccattgtggatctagtttagtatatttctgtcagatcagcaaatctcgttttcaaaggaaggtaaaatctagcgtattagggaaggaattttaaagcattgtctttttattacactaacaccctcctgtcttctattttttaggaaatattctgctgtacgtagagatggctctttccattatgtccacagtactccctttggcaactattcgttcatctgtgtagatgccactgtaaatccagggcctaagagaccctataatttctttggaattttagataaggtgcagtaaaaatcttacttccctttgtagcttacttattttttcatggatacgtgtggatcacttaaagttatcaaaagtaaactagttgttatctaggaatgctttggagaaatttaacttggttacaggtatggctagaagttactggctatttcagcactatttttgctatcctttttcttgtcccaaaatctgagaaagaagtacctcacactttatggagtaaacatttattaaataggtactgagtacaggatgcactttgcaagttacaggacatacagctttgtgtggtatattcctaagttcccacaattgccagttctaactagtgtttattttttgagacggagttttgctctgtcggccaggctggagtgcagtggtgtgatttcagctcactgcaacctccacatcccaggctcaagcaattcttgtgcctcagcctcccaaatagctaagattacaggcacgtgccaccatgcccagctaatttttgcatttttagtagaaagggggtttcgccatgttggccagggtggtctcgaactcctgatctcaagtgatccacctgcctcagcctcccaaagtgctgggattacaggcatgagccactgtgcccagctggtctgtatttttttaaagaagagaaggatgactattgaaatcaataagtttattttcaagtattttgacaaggctaggtgattgctggatttaaactgtgtggaaagtctcatttgagaacctcttattatttcttggtacagtaaatgccaactcattatttaataagcatatgcccctaagtaagacatatgtgctcatatgaaagaatacaaaagtgataagatcaagttcttagactcttagagtatttaatctagtggtgaggtataagaccagtatagaaataaatataataaagagcagaatttgctaaattagaactaagaggttcagagttatacgagagttcgaaagaatgtgaaatcaagtgaacagaatattgtcaaatgcattgtgttactttaggcattttatttaattaggttctattttgtttcttatctatcaagtgtctttagtcagggttgatgaacttatattaaatcccattccttagtatagtgttttttaaaggtagaattcaaggatcatgtacatgaaaaccaactggagtgttacaaaatacagattcccttgccttgccccagacttatcaaattaaaaaccctgagggtagatcccagaaatgtattgctgtaagcaccttacatataatattaatgcatatttacataggtaccagttattttttgaaatcaacttttgaggtatgatttgagtactataaaataccctcattttaaatgtttgaagagttttgacaaatgtatatattggtataactgtcaccacagttaagacatagaacatttccatcatcctaaagtcttgtcatccttgtacagtctgtcttcacttcctagggaattactgattggttttctatcagtatagattcattttgtttgttctaaaattttgtataaatgaaatcatacagtatgtactcttgggtctggcttcttttgctcagtataatgtttctgagatccatccgtatgattgtgtgtatcagtagttctttcctttctgttgctgagtgctgttccatcgtgtggatgtattacaacttgttgatggtttctagtttttggctattatcagagctgttataaacatttaggtagaagtctttccatgatattattttagaagtttagtttctgtatcctctttattaatcgtaaagtgttatacaaagctgtaaagattagtgatgacttcatttcgcagtttccttatctattaaaagaggataatacctaccctacctattgcagagttatttttagtatcaaatgaaatataatgtatgtgaaaacaatttgaaacttacagaggtccatagaggtcattaactagtaaggtttaaggcctagacacatataataattattataaatcttcagaggagttttctaatctgttgacattagattttagcctgagccctaatttaagatccttccatttttctcccatctcagaaaaagatggaggagctcttattactggccaaggaaagcagtcggagcaaccatacaatttggtttggacactttacaacatccactattctttctccatcaccaggaatccggtcaataatgaggtgagacaagcttccaaaatcagaattaatttgtttttagtttttttattttgctgttacctattctgcttttctggcaagacatttttattagtttggcctcacgcgttatctttgttcatttatttcatttatttttcattggttagttcggctatagcttatttgtgtggacatctccatacacttggtggactgatgcctgttttgcacactcgtcacttccagggcactttggaacttgaggtgggagactggaaggataataggaggtaagggaacctccccatagaagaaaacttatacacataagttttgccaaagcaatgatagttttcttactgatatcatgggtgatcacagttaaagaaaaacttgtgatatttctgtttttttaaagtaatatatgtctctgaaatctttgtcattttgcggaaaccttgtcatagcagggatgtttactatcactatgttacattggattttcaagatatgtccattaggaattggactcaaactctagtgtgcacaagaattatggaggagcttatgaaaaataaaaattttcaggcgctgcctctagagattttgattgtgttggtctggattagggtccaacaaattacatttttttttttttttgagacagagtcacgttcagctgcccagagtagctgagattacaggcacccaccatcatgctcagctaatttttgtattttagtagagatggggtttcaccatgtttgccaggctggtcttgaactcttgacctcaggtgatccacccgcctcggcctcccaaagtactaggattacaggcgtgagccatggcgcctggcccaaactgccttttttaaaagccctctgggtggtctatgcatgacaatttgagaaatactaggactagaagtgtcatgtttttcctcctgaattttgtatctaccatactggttattgttacaagatggtagtgatttaacttcttcaaatagatgatagttggcttttttaaggttaaagtctctctaagagaaaatatgtttatcaaaagcatgtagtgtagttaaatatatggttttttcttttttaaaaagaagtatttaagtgaaatagtttatcaagttttgaggagtatcatcttattgtttaactattacagttatttaatttacacaaaccctgtgctctcagataataggtactcagcaaaggtttgttgagctgaatatgttatctttttatttttaactacttccattaattaaaaaggaactttacatcttggaaggtactttctcattttggttgactttttaaaaactgtgtgagttatgcttgaaacgtgtaattatttggcaactataattactttgagctaagagttgtctgttcatggctgtgaggctgtgggctgggctatgattgccttttgtgagatagtcttactaagccttgaccagcttctttatttcttctaagtgctctagttacaagttgtgatgttaattatgaaggcatttcctttctctctccaccagttttcctgtgtccaaccctggggttttatttggagcgtactccagataaaaggacctaaactttacctgcccttataaacacttaaattgtgttagttacaatagaataatttttaaaaacagtatattggaaatattaggctaggccttgttgtagatgcagataaatccagaaatatcagtggcttaacacaaatgtttttcatttgtataaattcaatatgagtcagaacaactcttatccatgggatgagtcagtaattcagacttcctccatcttaaaattcctatttcgacatgtcgattccagggcagggaagagagcaaggagaactcacacccactcttaagtactttggaccacaggcatgatatgtgtcacttctcttcacagcccattggccaaaactagtcacatggtcccaacctgataccaggagactgggaaattcaggggaatgtgtagagaatttcgtgagcactattgtttctgccatagtgaatcatttctttttttagttctaaaagttagaaaatataaaactttggttattctttaatgaatattttataccttttgttattgcatttggaaaatgaaaacaactttaatttctttgaaattatagaaataaatgtttaatgctaggcatggtggcttacgcctataatcccagcactttgggaagccaaggtgagggggatcacctgcggtcaggagttcgagaccagcctggccaacatggtgaaaccctatctctgctaaaaatagccaggtgtggtggcgggcacctgtaatcccagctacttgggaggctgaggcagaggttgcagtgagccaagactgcgccactgcactccagcctgggtgacggagtgagactccatctcaaaaataagaaaaaaaaaaaaaaaaaagaaagaaaggtttaaaagaagcatgaaagatttctaattttgttcatatcaaccattttaatattttatgtagcattgttgatgggatgaagaatgtcaagtattagggttataataaatattttaggttcaaaattgtcttaaagtacagggataagatgagttacttcaacaagtatttatttaaaaattaaagagtacatgccgtgtaccaggtgttgttcaagagcacagttgaatccattgcccagtcagaggcagttatgtgacaaatgtgaaggataaagtgatggggtaagggaagaaagaaagaaaatattacttaatctgtattcaaattaatcatgtaaaaaagtcctagttatgtatttttatatttgttctgtatattaccttcatgacctcttacaatgtgaagtgactaaattaccttatcattatctggtctttaggtaccggatttttgcttttgatcacgacctctttagctttgcagatttgatctttgggaagtggcctgtggttcttatcaccaatcctaaatcactcctttatagttgtggtgaacatgaaccactagaaagacttcttcactcaacacacatcaggtatgtagcaattttttagaatttactttcagtttgataatgaaggagaataagtcattgtgattgcattcccatgtgaaagctatgagatgccccattttagttttctcaacaacctaaacattatataaagatagattgcttactgttttgtttccattaagttaaaaagcatatcatttttttaagctgatgaaattttaaaaaccattcagaaatctataattctaccattattatttttgttttattttattccagcctttttatttggacgcttttacattgctataagcataatgtacatattcctttatagtctactttttaaaatttgcattatatatcaaattttttttcatttgttatgtagccttctaagaaagcaaaagctatatatataatccttatggaattgaaaattcagttggcaaatgaatttgttttgttttgttttgttttgattttcgacagagtcttgctttgttgcccgggctggagtgcagtggcctgatcttggctcactgcaaccactgcctcccgagttcaagcttttctcatgcctcagcctctggagtagctgagattacagatgtgtgccaccacgcctggctaatttttgtatttttagtagagagagggtttcaccgcgttggccaggctggtctcgaactcctgacctcaagggatccgccctcctacgcctccccaagtgctgggattacaggcttgaaccaccatgcctggccatgaatttgattatatagattaatagaatccaaatgggacattaacattctttttgcaaagagatatataacttgtttcaaatgtaagagcactttttaaaatatacttttacaatttattttgaaaagtaatacaatagaacaacctttggaaaatagggtaatgggattttaagtatgtttttctccacttctaatagaactattattagcacttctgagtatttcttctcaggcattctctcttaagatgtttttatataattataatcataaggcacagtctattctaattcctgatttgttttctttcagcacaaagaatgtaccacagtttttctaaccattttcatatctcattggtgaacttttaaggtttttcttatttgtggatgaatatctggtacatatatattcttccttcacttgaataatttctttaagaaagagttctagaagtgggattctaggtgaaagaatttgaattcttttatgactgttgataaaaattgctcaatccctttttttttggagctaaaatcactatttttaatcatggtaagcatgattaaacaaagtacacatggcataaaatgtaccattttaaccattttcaagtgtacagttcagtagcattaagtttgcttcaagtttacattgttttgcaaccatcaccattatccatttccagaacatttatcattttctaaaactgaaacttttacccattaaacaataacttcctgttcttccctctcccacagcccctggcaaccaccaatctactttctgtctctatgaatttgactactctagctaactcatataagtggaaccattcaatatttatacttttgtgactggcttattttcatttaacatgatgtcttcaaggtttatacatgttgtggcatatgtcagaatttccttccttttaaaggctgaataatgttccattgtacattgtgtgtgtgtgtgtgtgtgtgtgtgtgtatatacacacatatgtatacacacatacacacataccacattttgtttatgtgttcaatggacacttgggttgcttctaacttttggctatattgaataacgcttctatgaatatgagtgtacagataacggttcaagtccctgctgtcacttcttttagatatatatccagaagtggaattgctggatcatatggtaattatctgtttaattttttaaggagctgccatactgttttccatggtggctgcaccattttacattcccaccagcagtgtatcaggtatccaattactttcaacaacagatgctaatttatcatattaccaagcaatatgaatgccaaattcacaatactcttattattattggatattatgctttaaaaagtatttactaattaacttgtaaaaaatggtaccaagatgtttacatttattgttttcatcactaatgaaatggaacacacatgtgtcagtcaggttttttggtgggagctggatatcaggtttaggtgtcatactctctgaaagggcttggtagcctagttctggttataaccctgtttctttgggacagacaccctggtaccaaatgagtagatggtaggcttgacattagattaacaaaatgagatttccaccctatattattttcctaagagaaaaatcagtacttctggagtttcttcagaaagaactttgaatctaccttacctagatttgtcaaaagaaaattgatttttctttctaaaaagtaaaagaatagttccgaatttcttaccagttcagttttgctaattgtccaactccagaagccaccattcggaaagaaaccagatcatatcaatagtggctcctgctgttgtacaatatgatggttctgcctatacgtgtatatctgcaagttacaataaggttattctcctttgcaaaaacaatgacaaacctcaaaccatgtgttttatatatgctctcattttagagtcttggccttttccttatcctccattacttctgtcacagttaagattgatggagttcatttaggccaggctgttcatgtgtctggtcccattttcgtactgaagtggaatcctagaaactacagtagtgggacacataacatagaagtaatcgtccaggtaagttagtaatttatatttactatgtaaatgattaagctgtagccacaatgaattctggtttggaattttttagtcaattggtaatgaaaccatgtttaaaaaaaaactgggggccgggcatggtggctcacgcctgtaatcccagcactttgggaggccaaggcaggcagatcacctaagcataggagttcgagaccagcctgggcaaaacagtgaaaccctgtctttacaaaaaaatacaaaaattggctgggcacagtggcatgtgcctgtagtcccagctactcaggaggctgaggcaggagaatccacttgagcccaggaggtagaggttgcagtgagctgagattgcaccactgcactccagcctgggcaacagagccagaccctgtctcaaaataaacaaaaaaagtgaaaaaattggggctgaggctggaggatcgcttgaggccagtagtttgagaccagccagggcaacatagtgagaccgcatctcaacaaaaaaataaaagttagctgggcatggtggcgtgcatctgtagtcctagctacttgggaggctgagatggaaggatcgcttgagcccaggagttcaaggttatagtgagctctgattgtgccagtgcactctagcctgagtaacaaagcgagaccctatctcaaaaaataaataaataaaaataaaaataaattgaatacactgtatttagtatattctgaaaatgggcacttggaataattctaatattagattaaaaactaggcagaggagaagaggagtggccatagactccctttttttagccccaggaaatcattcttgtgttttcttccaactttgcccagaatcttttcataataggggcaaattccccagtatacccaaaggtaatagaataagtcagaaaacatgtattatgtatccatgtctttgattgctgtctctaattgtaggacaattgtgtcattatttgaaagcttcaggacacagaattttcagtgcatcagaagcacttttttgttagaggaataagcattgttagcatatgcagtaccagtttgccttttcttattctgattcaatttagggcatttaatttattagcacctgccagagtagaaaataataatcattaccaaaatagagcagtttcattaaactcttaaggcgataagctgtgctcagaaattagtttcttaaacacacacacacacacacacacctgtcaatttctgcaactttatgatttgatgacagttgttaactatttaatcttctaatattaagacttaatttgaaacactaaataatttttcagaaaacatatgtagttattttcattatcttttttatcccccctacagagacaggttgagtaggaagaaactatttactgagctccctctaaggagatgctaggcacttagaattttttacttaatccacaaaacaatcctttgttgggggtagttttacccttggtttgtaaatggagaaacttgtacatctgcacaaaagaagacactctgctatgccatccatctttaaaatgttctgtgtagaaggaagaaaaaacttacagcagaagtagaaggagagatagctggggatgaacccttaaggtctttcatattagaagaaggtggatcattttaaagagacttgaaggttcatgtgcacctagaataaattattccctgtcttcacagtcactacagtctggagtgcctcagaaccccagtgtattattttcttaataagatatacatacaacttctgtagttttatgaagaaaaaaaaaccatagcttatattccttgaaacatttctggctgcttagttgaatccttagtaaaaatgtaaaatcacatactttttgtatgtttaacatttcttacaatggtatcaaggtataatttatacataataacataataaaccctgtatatttaaagtatacaatttggtgagttttgacatatgtatacatccttgaagtcatcgcctacaaacaatatgatacatttccctcaaaagttttcttgtatcctttgcaatctgttttccttacatcctcattctcaggcaaggactgatctgttttctgttttcttatatgtataactttaaacaacctactgagtattaaatagggaacctggtcccttcattcattcatgggaaagttctgtccttttaagtacagtaaactgtagataagtcagatttgaaactcaaaatccgtgggagaagacacttattatctaatattttacctactcattgtatttattgaatatctataggttccccacagtctagtagcaactagacctttagatcaattttcaatgtgggtcctgggctagtggcatcagtatcacctgggaacttgttagaaatggaaattctcaggtcccatctgaaatctactgaatcagaaactttggagataggacctagcaatctagtttaacaatctctccaggtgattctgatgtccactaaagtatgagtatctgtagtttaagattattgtgcctactttgccaatttaaagagtagaccctagaaaggtctaatctcaaacattagaaaaatctagattcctgctttaaaacaataacatagtttaatataagcacattttgagcaataaaagcttaaaaaacacaactgtaagttcttattgttatttttaaagttttttttataatgggaaaattttaaatatacaaaagagataatattataatgaactcccatgtatccatcagccagtctcaacaattatcaactcatgatcaatcttgttccttctttatccctatctcccctccctgcaccatgatgtctttcatctgtaaatatgtcaatatttatcagtaaaatataaggactgttttttaaaaacttaaccatgataccatatcatacctggaagactaacagtagttccgtaatatcgaactacccatttaatgttcggttatcccaatatgttacatagatagataggcagatagatagataaatagatatgtatattttcatttggttggttcaaatcggaattcaatcaaggctcttacattctatttaaccgacttgtctctttcatctcttttactgtacagattgcatcccttacctcccccctcttttttttccccttaaaatttatttgttttggaaactgaatctttggtcctgtggagttccctgttttctggatttttgctgtttacatccctggggtatcatttaacatgttcctctgtccctgtcccctttaggttctataattggtagttagatttagaggtttcatcagatttacatctgtttgttttttggcaagagtactttatctggttttttatgcttttaacaggatgcccataatatttggttgtctctctttctataatgttaagatggatcagtgtattcagctgttggtagccttatccactgatgtgctggtaaatatttagtaaccagcttggggcaagttacaggggtcaaggagaggggatcctgatttgtagcatttccctgatttgtaccaatccccataatataaatatttctaccatggctggttttaagctaccaacgccatgctaagtggcctgcaaaattgctgaaaacttaacatttggctcttatgagcagtcaagccagctccagcacactgctggctcatccctccattatcttttcacctaagggtttttagcagccattgatgatacttacctaaatccattttttattagagttataaaatggtgatattcacattttctttccttattataggaatattaattagaacagtcctatgaagaaaaaaattatcttatctatttggtacccagatataaagttcacacacaaaatgcaagataaattcttctttccccattgcccctttactaaagcagttttcagaataatgagttggttctttagtatctgccaaaggtgactgagtcttttacatttagtagtattataaattcaaagtttaaaaaatatattgatgtataaaaaatacttgatgtatttcagtccattgcatttattattttccatgctcaaattgttccacctttggctagtgggagcctcttcatgttgactactaagccctttgacacaatcccagtagtctttgttcgttttcttactttctgatttgacaagatattccaagcttttcttatgcatttttttctttaaaaaaattttttttaaagttttactttttgtgagtacatagtaggtgtgtatatctgtgggttacatgaggtgttttgatacaggcatgcaatgcgtaataatcacatcatggaaaatggagtatccaccctctcaagcatttgtccttgttttacaaacagtccaattacactcttttagttatttttaaaagtacaattattattgactctagtcactctgttgtgctatcaaatagtaggtcttattcattctttttatgctttttgtactgattaaccatccccacctccctcccaatgcccccttactaccctttctagcctctggtaaccattcttctactctctgtatccatgagttcaattgttttgatatttggatccaacaagtaagtgagaacaagtgatgtttgtctttctgtccctggcttattttacttaacatagtggtctccagttccatccatgttgttgcaaatgataggatcttattcttttttgatggctgaatagtactctattatgtatatatacctcattttctttatccattcatctgttgatggacacttaggttgcttccaaatcttattgtgagcagtgctgcaacaaacatgggagtgcagatatctcttcttgtgcacttcctattcaagaactggaatgagctgtttccctaaagagcactggtttcttgtagtgagaaatactattttgagaccgcaacctgggcaccagcctaggtagctcattactgttagctttgttgttatttctaggcctttttagggaacagagggaaataaaaaaattttttttaaagggaaaatacacgtgagtgcatgctaatatttactctttaaatgtagaattataggttttaatctctttttttgtttttttgacagagtctcactctgtcacccaggctggagtgcagtggcgtgatctcggctcactgcaagctcttcttcctgggttcaaacaattctcctgcctcaggcccctgagtagctaggattacaggtgcgtatcaccatgcctggctaatttttgtatttttagtagagatggggtttcactatgttggccagggtggtcttgaacgcctggcctcaagtgatccacctgccttggcctcccaaagtgctgggattacaggtgtgagccaccttgcctggcctaagaaatattattaaaagtacttataaggccagcactttgggaggccaatgcaggaagactgcttgaggccaggagttcaagaccagcttgggcaacatagcaagaccccatctctaaaataaatttaaatattagccaggcgtagtggtgtgtgcctatagtcctgcagctgtatcaggaagatcacttgaccacagaagatgaaagctgcagtgagctagctatgattgcaccactgcacgccagcctggacaacagagagaaaccttgaaaaacaacaacaacaacaacaacaacaataacaacaacaacaaagtgtagttattagaaacctattcttattttaatttagaacattataaatatttccatgtacatgaaagttacttttcttctgtggttattactaggattctgctggaagaagtaagagtgttcaccacatattttctgttcaagagaataatcatctcagttttgatcccctggcatcatttattctccgtactgatcactacatcatggtaagtgaattcaattaaatattacatatgttaaatgcagagtcctaaataatatacagtagtcctcccttatccatgatttcactttccatggtttcagttaccgaaggtcatccatggtctgaaaatattatatataataagatattttgagagacagagaccatagtcttgtaactttattatagtatattgttataattgttctattttattattattgttgtcgatctgctgtgcctaatttataaattaaactttatcataggtatgtatttataggaaaaaacataatatatatagggttcggtactatctgtgttttcaggcatccactgggggggacttggaatgtgtcccctgtggataaagggggactattgtaaacatatgacaagaaagttgaatcttataaaattaaaggttagttatttgtctagaagaataaaatgcttttaagttgatttgaattaaaagaagcagaggcatggatgagtcatttgggatgctataaatccaggataactaagggaattataacaaaggatattagttatcatatcgaagggaattataactaaggatgctataaaaacaggataactaagggaattatagggactatgccaacttgggttaaggctttttaaagaatatttctttccacatcaataatatatgctcagtgtagaaaacttggaaaatttagaaataaagttaaatcagccacacatctttcttttatcacactatccattataaccattgtatttgtcattatgatactctaatttttctctcttatatacacatgtgtatatatatatgtgtgtgtgtatatatgtattttgtttgtttgcttgtttgttttttgttttttctggaatcagagttttgctcttgtttcccaggctggagtgcaatagtgccatctcggctcactgcaacctccacctcctgggttcaagtgattctcctgcctcagcctcctgagtagctgggattacaggtgcctgccaccacgcccagctaattttttgtatttttttagtagagacggagtttcactgttggccaggctggtctcgaactcctgacctcaggcaatccacccgcctcagcctcccaaagtgctgggattacaggcatgagccaccatgcccagcttgtatatgtatttttttttgtatatgtatttttaacataaatactattatacctttattctcttttgctgtctgatttttttccactgaggaatttgtcttgactattttctcttatcaatttatattataacatattagctgcattatattgccatagatatgccttaatttttattttattttattttttttgagacagagtcttgctctgtcacccaggctggagtacagcagtgcgatcttggctcactgcaacctccgcctcctggattcaagtgattctcctgtttcagcctcccaagtagctgggactacaggtgtccccgaccacgtccagcttttttttttttttttcagtagagtcggggttttgccatattggccaggctggtctcgaactcctgacctcaagtgatccacccgcctcccaaagtgctgggactacaggcgtgagccactgcccctggcccttttttttttgttgttgagctggagtctcgctctgtctcccaggctggagtgcaatggcacgatcccggctcactgcaacttctgcctcctgggttcaagtgattctcttacctcagtctcctgagtagccaggattaccggcgcccaccaccatgcccggctaatttttgtatttttagtagagacggggtttcgccatgttggtcaggctggtcttgaactcctgacctcaggtgatccacccacctcagcctcccaaagtgttgggattacagcggtaagccaccgcacctggctgccttaatttttttaatcacttctctattgttggacatttaagttgtttctaatttgcccctctactgtataaataatgcttgtaactaagtttttagatatctctctaatatagtttcttgggatcaatttctagaagtgaatttctggatcaaagggtgggcacactattttatatactttactatttatatacataattacataaattatttattatttataaccatcatttttttttcctatcctcgctcattaaaatataagccccatgagggcttatattttggtatgcttggcacatagtaggccctcaataaatatttcttaaatgagtaaatgggtatttttttagtttttaatatacactgttaaattgtcttttagagaagctatggtaatttatactgtagttccctcagatctcatttatcctgggtgttagcataaaataaaaataaaaaaaaaagaaatacactaaaattttcagaagaaaacttaaaccttccttaatttcacctcccagagataggtttagtgtatattctcacggacttaaaatgtgagatcattattattttaatttacttttgttacttgtatgattttttcagacatattattaataagcatttgcatctcattactacaaaatttttaaatcatttgttattttttcttttgtggatttttaacagtcacctaaattaggcttggggaattttgatattcaaatgaataacctggatgttattaaaatacggttctggggccgggctcggtggctcaagcctgtaatcccagcactttgggaggctgaggcgggcggatcacgaggtcaggagatcgagaccatcctggctaacatggtgaaaccccgtctctactaaaaatacaaaaaattagctgggcatggaggtgggcacctgtagtcccagctacttgggaggctgaggcaggagaatggcgtgaacccgggaggcggagcttgcagtgagccaagatcatgccactgcacttcagcctgggtgacagagcgagactccgtctcaaaaaaaaaaacaaaaaacaaaaaaacaggttgtggtttagcaattctgagaaggggactgagattctgcattcctaacaggctttagtggattccagtgacggtccaggatcttactttgagaaacaagcacctaggtcatatgtcactattgtgaattcatctccaggtgaatgacttcttgagaagaaagcaaaagaaaacagtctatgttcactcagcctgcagtgtagtctatactgtttttttattcttatagaactttaaaacaaaacaaagtatccttctcccagtacaatgaaagtggactattttaatttgattgcttaatataattgtataaaattacttagcttcaatattggtctaagtatctaaattcagaaagagcaatgctgaagcaatttataattttctttattggtggatcagatgtttgattccatctcttaaaggctccatctcttaaaaagaaaagacttaaagagtccatctcttaaaaaaactgatgttgtggttattatttttgataggtttatcttttagtcttcttactcaagatgtgagtggtttatgtaccacaattacagtgtcagagtattctatattaggctgtatatttactgttgccagtgagttttataccttcagatgatttcttttttcttttctttttttttttttttgagatggggtcctcccaagtagctgagactacaggcacatgccaatacaaccagctaatttttactttttttttgtagagacggggtctcactttgttgcctagactggtcttgaactcctggcttcaagcaatcctcctgcctcggcctcccaaaatgttggaattacaggcgtgaatcactgtgcctagacttctcattgctcattaacatccttttctttcagactgaagaacttcctttaacatttcttataggacaggtctggtgttgatgaaatccctcagctttgtttgtttgggaaagtcagctttgtttgtttgggaaagtctttatttctccttcatgtttgaaggatatttttgctgaacataatattctaagataaaattattttccttctgaatatgtcatgccactttctcctagccttaaggtttccactgagaagtctgctgccagacatattggagctcctttgcatgttatttgtttcttctctcttgttgcttttaagatcctttccttatcattgccctttgggaatttggttaataaatgccgttaggtagtcttatttgggttaaaacttcttggtgttctatgaccttcttgtacctgaatattgatatatttctttaggttaaaaaagttctctattattattttttgaataaacttcctactctgatctctctctgtacctcctctttaaggccaataactcttagatttgtcctgttgaggctgttttctagatcttgtaggtgtgcttcattctttttttttttcctttttttctcctctgtgtattttcatatagatggtctttaagctcactaattctttcttctatttgatgagttctgcccttgagaaattctgatgcatttgtcagtttgtcaatttaatctttcagcttcagaatttctgctttgattttttaaaattattgtaatgtcttcattaaatttctgtgataggaggctgggtgcggtggctcacgcctgtaatcccggcactttgggaggccgaggtgggcggatcacaaggtcgggagatagagaacatcctggctaacacagtgaaaccccatctctactaaaaatacaaaaaattagcccggtgtggtggcgggcacctgtagtctcagctactcgggaggctgaggcaggagaatggcatgaacccaggaggcggagcttgtagtgagccaagattgcgccactgcactccagcctgggtaacagagcaagactccgtctcaaaaaaaaaataaaataaattaaataaaaaataaataaataaataaataaataaatttctgtgataggaatttgaattccttttctgtgttttcaagaagttcattgagcttcctcaaaacagctattttgaattctctgtctgaaagttcacataactctgtcactccaggaatggtctctggtgccttatttagttcatttggtgaggtcatgttttcctggatgttcttgaggcttgtggatgtttgtcagtgtctgggccttgaagagttaggtatttattctaatctttgtagtctgggcttgtttgtactcatcctccttgaggaggctttccaggtattcaaagaattgagggttgtgatctaagtctttggtcactgcagccatatctgtacaagggggtgccccaagcccagtaatactgcaactcttgcagccttacgtgggcttggtgggcttgggtaagaactgggagaattctcttgattaccaggcagagtcttttgttttcttttcttttttttctttccagagattttatttgttttggtggcagagacagagtagactgtgcttacttcgttttaacaagaaccataaccccaaatctctaacataccaaagtagagggaatcatacagcaaacacctatgtatccattgcccatattagattgcatcttttcttttaaacagaatatctgaggattgccatgtttctaatatgttaaatacaggactggtttgtgtcagagtgcaaatcaattattcctgaaatgatggagagatatttcaccaacttgttctccttgaggtttttctttttttttttttttttattgatcattcttgggtgtttctcgcagagggggatttggcaggatcacaggacaatagtggagggaaggtcagcagataaacaagtgaacaaaggtctctggttttcctaggcagaggaccctgcggccttccgcagtttttgtgtccctgggtacttgagattagggagtggtgatgccttcaagcatctgtttaacaaagcacatcttgcaccgcccttaatccattcaaccctgagtggatacaccacatgtttcagagagcacagggttgggggtaaggtcacagatcaacaggatcccaaggcagaataatttttcttagtacagaacaaaatgaaaagtctcccatgtctacctctttctacacagacacggcaaccatccgatttctcaatcttttccccaccttcccccctttctattccacaaaaccgccattgtcatcatggcccgttctcaatgagctgttgggtacacctcccagacggggtggtggccgggcagaggggctcctcacttcccagtaggggcggctgggcagaggcgcccctcacctcccggactgggcggctggccaggcggggggctgacccccccacctccctcccggacgggtcggctggccgggcggggggctgaccccccacctccctcccggatggggcggctggccgagcggggggctgacccccccacctccctcccggacggggtggctgccgggcggagacgctcctcacttcccagacggggtggctgccgggcggaggggctcctcacttctcagacggggcggctgctgggctgaggggcacctcacttctcagacggggcggttgccaggcagagggtctcctcacttctcagacggggcggcccggcagagacgctcctcacatcccggacggggcggcagggcagaggcgctccccacatctcagacgatgggcagccgggcagagacgctcctcacttcctagatgggatggcggccgggaagaggcgctcctcactttctagatgtgatggcggccaggcagagacgctcctcactttccagactgggcagccaggcagaggggctcctcacatcccagacgatgggcggccaggcagagacgctcctcacttcccagacggggtggcggccgggtagaggctgcaatctcggcactttgggaggccaaggcaggctgctgggaggtcgaggttgtagcgagccgagatcacgccactgcactccagcctgggcaccattgagcactgagtgaacgagactccgtctgcaatcccggcacctcgggaggccgaggctggcggatcactcatggttaggagctggagaccagcccggccaacacagcgaaaccccgtctccaccaaaaaaatacgaaaaccagtcaggcgtggcggcgcacgcctgcaatcgcaggcactcggcaggctgaggcaggagactcaggccgggaggttgcagtgagccgagatggcagcggtacagtccagcttcggctcggcatcagagggagactgtggaaagagagggagagggagaccgtggggagagagagggagagggagagggagagggagacggagacggagagggagagggagagggagagggagagggagaggggtcttttgttttctttcctcacttttccccaagcagaaggagcctctctctttgctggcctgcctggatatgtgggagaggtgaccacagtttgtaccgttctgggtcacacctgaattcaccatagtactgggtcttgtccaagttctgtggtgactactgcttggctactgctgatgtttattcaaggcccaggggctctttagtcagcagatggtgaatcttgccaggacatggtctttctcttcaacacagcaggttttcttctggcccaggctgagtctagaaatgccatccaggagtgagggcctgggctcagaggcttcaggaatctgcttggtgctttatttttactgtggctgagctggtacccaggtggcaaaacaaagtcctctttacttttctctcttgtttccacaagaggaaggagtctctctttgagctgcactgcctggagagttgggggatgggtgacacaagtactcccctggccaccacaactggtgtctcactgggtcttgtgcactccatttccactggctctgagcccaacatagtacccagatttgcccaaggactgcagtccttgtggcttgactgcctttcaagtttattcaggaccctagggcacttgtttagtcagctggtgctggagctagctggaactcaggttcctaccactggggcagaggattgccctctggcaagggccagcttaaatgctccctctgtgggtgctggcagaattctgccctgtgttgtgttcccctgtgacagcactgagttccaacgcaaagtctcacagtcattttgctctctcccacaagtgcacagattatctctgccacagaatgggggaagggtggtgtaggcaatgaagtactgtgttgtctacgctttttagtgcctctttccttgatatgatgttaaaaccaggtactgtgatcactcatctgatttttggttcttatgaaagtgctttcttgtggggatagttgttcaatttggtgttctgaggggaaaggggtggatgattgctggaaggttctatttggccatcttgctttacctcctccaaaaggggcttgttatgaataacaataggtattccttttactttatcactctagagctgttttaggagccagagacaaaatccaaatgttataacaatatgctcctatccttgttatcacttagaaaattacaaggattttaggagctctgaccagtggggacaaagaccaaaatatgtatttcttatatcacagtatcacagatgccatttccatttttgttaataaggctactttaaaaatcttaactgaaagtgtacccatgtatctatttcacgttaacatctatttccctgcaggcccgggtcctttttgtgctgattgtgctgagccagctcaccattctcattatttttagatatcgaggatacccagagcttaaaggttagttatggttccttttattcctataagccttgttcatggaaaaaaccaaactccgtaaaatattttaaagaggtttattctaagccaatatgaatgaccatggcccagggaaaacacaaactcaagaagccttgagtaaatggtcctgaggcagttggattacagttgggatttatacattttatggaggcaggggttataggaaaagacataaagcaatacatggaaggtatgcattgcttcggccccaaaagttgggatatcttgaagtgggggcttacaggttttacggggattcagagattctttaatttgcaattggttaaaggactgaggctctgtctaaaacttgtcagcagaaaggaatgtttacgttaagataaggatgctaggtcagccacaatatactgggtgaaaaatgacctgtttaggaagattgatgtcctgcaggcattatatcttgtttataatttggtatcttattgtgacagagtctgttttgtcagtcttatgatctctattttaacattaatgatggtctgttgttgtgcccaaactctaaaagggagggagtatgacaaggtgtgtctgacctccctttccatcgtggctgagaactcaatttttaaggtttctttggggtccccttggccaagagatatcccaaaattagttcaaggtcaaaaaagatttaatttataacttgatccttgggaggcatgccaaagatgtcaaaaggtttaaaacacttggtcagaataggaatagatgtcattgtgaagtaatagtcactcacttaaacagagagacaattaaaagacttcataaacaatgcagaaagttctgtggctgtaaacaaaaacctttcaaagctcagttttcctaagaaattaaaaaaaaactaataaggataatatgaaacataggaaattatcttgataatatgtaaaatctttgtttcttaggtcagttcccaaaaaagtaaagaaaaaaaccttcctgaagtgtgattgctcctccttatgggaagcctgtttagataacctggaagtgaaacctgatggaaagatacttaaatataatcagacataggaagagcatgcatccaaggttatatgtacacactatattatagagggacataaacaagaaaactagtaccttgagcaggggaatacagcgctcttagaaaaagcatgggaaatttcctggttatatgggcaattcagaaacatcaagaaaagccaagagtacagaatcaagttatatcggaggaaaacactggcctataaactctaaagctgcagttcagaagatgcttgaaaattaaattttaaagaaacagattttagaattaagtcaaaacctcttatggttgggcacagtggctcacgcctgtaatctcagcattgtgggaggccgagacgggcagatcacctgagatcaggagttcaagaccagcctggccgacatggtgaaacctcatctccactaaaaatacaaaaattagccaggcatggtggcacacacctgtagtcctagctactcgggaggctgaggcatgagaattgcttgaacttgggaggcagaggttgcagtgagccgagatcatgtcactgcactccagcttgggcaacagagcgagactctgtccttaaaaaaaaaaaaaaagttcccttcaaattccaaccatcctgatgatataaaacttccattacaggacccatccttcataaaccttccacaacttgcttagaccttccattattctcctaaactcctagtctttgtcctgtattttccccacttttatattggaataactaattattttaccataagacaaaaaaattacttaaaatttttttattcctttatattgagaccacataaaattctttctcatataaaaacagtttcatattaataaaaactttttttttttttttttttttgtgtgtgtgtgacctggaatttcgctctgtcccccaggctggagtgcagtggcgcaatctcagctcactgcaagctctgcctcctgggttcatgccattctcctgcctcagcctcccaagtagatgggactacaggcgcccaccaccacgcctggctaattttttgcatttttagtagagacagggtttcaccatgttagccagcttggtctcaatctcctaacatcatgatccacccgcctcagcctcccaaagtgctgggattacaggcatgagccactgtgcccagccttaataaaaacttaatttttagtaaccttaagctttaggttactctggaagtaagtaattttgaactgttatatattaacatctcatgaatatatagtttataatctctaaaaaaaattttttatggaacaatttttgaatgtggagtttactatttactaatagacccaagtatgttttgtctttctatgcaatttaagaaaccaagaaccaacttatactaatgtttagcaatttatgtttcagtattttatcttacttagaaatgactcagacatttcatgagtatctattacttaatttaatataatgtaactttaggatttaaaatcacatgaaaagttcatttataaatttatcccatttacattcatctaacttattttttaactacacatagattacttatgaaaactaagatattagatagagttagtcattatgtcaaggtatctttctgttaatcagttttacagcatgtgaatttcgggtgttcacctaagtagaaatcttaaagctaattatataaatattttgccaaaaactgaaaacagctatcttcattaaatcaactatattaaattagttttacttatcaaagagttacacaaagatcattctgattttaggctggatatatagttttgtgaccttttggtcaaatcctgcttaaaacatctagcacagagaaatgcaaaactatctgatcagtaaacccaggcaaaaaatgtatgctgacaattctgaagacatttctgtttttatcaacaaatttaaaatcaggtattttatgaaagatttacttaagtcacatgaactttcaggcatttgaaatcactatattttgatagaaaaatatatacatatactgatattaaaaaaataaaaacatatagactatcaaaaataaagaccttacaggaagaccttactacagtttttaccttaaaaatctagtcatttttcagtaagcatcagtcttcactcctaatggcaacatattaaaactcattaattcaggccaggtgcagtggctcatgcctgtaatcccagtactttgggaggccaaggtggatggatcacttgaggtcaggagttctagagcaccgtggccaacatggtgaaaccttgtctctactaaaaatacaaaaaatagccgggtgtggtggcatgcacctgtaatcccagctactcaggaggctgaggttgcagtgagccaagactgcgccactgcactccagcctgggcaaaatagtgagactccatctcaaaaaaacaaaacaacccattaattatttcttcaaatgttccttttccttttgagaggtcaccaatgccatgtcagtatcacctctctggattcctgaatagactcctaactgctgctcttatatccagtctctctatctaattcatcctcttcattattagccaattatccttcttatggcatctcatccatagatcacttctgtatgcaaaagccttaagtggctttccagaacacactgaataaaggtcagacatctctgcaagacactaaaaatcttccacagtctagtcttatttaactagccatgtcttcaaccagttacctgtattttagcctagatactttttcactgttccctatacgtgccatgctcatttctgcttctgtatttttctcatagtattatccctactttaagttatttttctaaacttatctaaatcttagcctcctgtaaggcttacctgaagacctcctttatcatactgttttctccagccattccaggtcataatgagctcttgcttatctgaatccctatagtcctttctcacaattaattctatacttaattagacagccactttgctttatataaccacttcgaatgtatatacattttctccttaaccagataagttcctcaatgcaggaactttttttttttttttttttttttagacagtctcgctgtgaaccccaagctggagtgcagtggtatgatctcagctcactgcaatctctgccacatgggttctcaagcaattctcttgcctcagcctcccaagtagctgggactacagacatgcaccaccacacccaggtaatttttgtattttttttttagtagagatgggtttcaccatgttggccaggctggtctcaaactcctgacctcaggtggatccgcctacctcagactcgcaaagtgctgggattacaggcttgagccactgtgcctgtcttcaatgcaggaactcttgcttcctaattctcttctgtttcccacagcccccagcaccaaatttgtgtataatagacaataaatacttgttgaatcaaattttcctgatcccttcttaatttggatgaaatccctgggattaaggactgatgatagagaaggggagtattgtagtaatgattaaacagtaacatgattaactgaataggtacagtacacatcctactgaatgtttttcttcttatatttattttaaaaattctacgaaaaagttcaagaagcattattatacatgtgtattttcctgaacataatgtaagtaaataaatatttgaagtccccagcctcttatatgggggctctcaatatttttatatagttatttaaatttgaaacatattttaacctacattgtttcacttaatccttaaaacaatcatgtgaggtaggtgctattgaccccattttaaagattagaaaacaaaggttttgggaggttatgtaaattgtccaaggtttcatagctaataagagatagaggagagactccaaacccaaggcttctgaccccaggtcagttctttcctctaaacaagacttttccactttggtcgtaccttagaaactgctgggggaacttctgaaatttcaatagctataacagcattctataccaattacatcagaatctctagggtgggacctaagcatcagtatcttttaaagctccctggatgattccaatgtgcagtcaagactgagaagcacggctttgtctaaagcagtatttctcaatcctgactgcttagaatcactgggttgctgcctaagatctccctctaccccaggcaaattaaatcagaatctctggagggtgagatacaagcatgagtattttctaaaagttcccctaggttattctaatgtgcagccaaaatggagaataattacttaaaatttaaagaatagctgcctctaaggctaaaggattttttaaaataataaataattattattctatctgaatatgtaggctaatactttgagaagtacagactagaacaaaaaagaagctgagagagtaacacaaagtaggaaaggtcatgcattatcaggctttgcataaaatgaagtgttaggctgagcaaggttataagtataaaatgaatgtgctggtcttttagcaaagacatgacttatttaacttacatcagactgtctttcattgagactagtcctttaaatattttttaccagtagtgttgctcagtgtatactgaacttcctttcatagtcctcagctgactggtttatggccagccacatgcatgggtgacatggctggttggggctgaggatctgtggtactgtagactgtggccgcagaatggagcttctctgagtcaagcccttacacttgggctttttggcactgtattttaaaagcacgttaatttggaaagtttagggaagcctttcagttggagtaagaggttagctgtgcgttaagaactgtagaaatagggaaagcgctggcagccaagatggccgaacaggaacagctccggtctacacctcccagcgtgagtgacacagaagacgggtgatttctgcatttccatctgaggtaccaggttcatctcactagggagtgccagacagtgggcgcaggacagtgggtccagcgcaccgtgcgtgagccgaagcagggcgaggcattgcctcactcgggaagcgcaaggggtcggggagttccctttcctagtcaaagaaaggggtaacagagggcacctggacaattgggtcactcccaccctaatactgcgcttttctgatgggcttaaaaaacagcgcaccagcagattatatcccgcacctggcttggagggtcctacacccacggagtctcgctgattgctagcacagcggtctgagatcaaactgcaaggcagcagtgaggctgggggaggggcgcccgccattgcccaggcttgcttaggtaaacaaagcagccgggaagctcgaactgggtggagcccaccacagctcaaggaggcctgcctgcctctgtaggctccacctctgggggcagggcacagacaaacaaaaagacagcagtcacctctgaagacttaaatgtccctgtctgacagctttgaagagagcagtggttctcccagcacgcagctggagatctgagaatgggcagactgcctcctcaagtgggtccctgacccctgacccccgagcagcccaactgggaggcacccccagtaggggcagactgacatctcacacggccgggtactcctctgagacaaaagttccagaggaacgatcagacagcagcattcgcggttcacgaaaatccgctgttctgcagccaccactgatgatacccaggcaaacagggtctggagtggacctctagcaaactccaacagacctgcagctgagggtcctgtctgttagaaggaaaactaacaaacagaaaggacatccacaccaaaaacccatctgtacatcaccatcatcaaagaccaaaagtagataaaaccacaaagatggggaaaaaaacagagcagaaaaactggaaaactctaaaaagcagagcgcctctcctcctccaaaggaacacagttcctcaccagcaatggaacaaagctggacggagaatgactttgacaagttgagagaagaaggcttcagacgatcaaactactccgagctacaggaggaaattcaaaccaaaggcaaagaagttaaaaactttgaaaaaaatttagacaaatgtgtaactagaataaccaatacagagaagtgcttaaaggagctgatggagctgaaagccaaggctcgagaactacgtgaagaatgtagaagcctcaggagccgatgcgatcaactggaagaaagggtatcagcgatggaagatgaaatgaatgaaatgaagcgagaagggaagtttagagaaaaaagaataaaaagaaacgagcaaagcctccaagaaatatgggactatgtgaaaagaccaaatctgctatgtgaaaagaagacacttatgcagccaaaaaacacatgaaaaaatactcaccgtcactggccatcagagaaatggaaatcaaaaccacaatgagataccatctcacaccagttagaatggcaatcattaaaaagtcaggaagcaacaggtgctggagaggatgtggagaaataggaacacttttacactgttggtgggactgtaaactagttcaaccattgtggaagttggtgtggtgattcttcagggatctagaactagaaataccatttgacccagccatcccattactgggtatatacccaaaagactataaatcatgctgctataaagacacatgcacatgtatgtttattgtggcactattcagaatagcaaagacttggaaccaacccaaatgtccaacaacgatagactggattaagaaaatgtggcacatatacaccatggaatactatgcagccataaaaaatgagttcatgtcctttgtagggacatggatgaaattggaaatcatcattctcagtaaactatcgcaaggacaaaaaaccaaacaccgtatgttctcactcatcggtgggaattgaacaatgagaacacatggacacaggaaggggaacatcacactctggggactgttgtggggtggggtcagggggagggatagcattaggagatatacctaatgctaaatgacgagttaatgggtgcagcacaccagcatggcacatgtatacatatgtaactaacctgcacattgtgcacatgtaccctaaaacttaaagtataataataaaaattaaaaaaaaagaactgtataatgtataggaaaggaccatatttggacagatactcatatttatgattagaatgaagatattttgatatttcttttaatttacttttgaagtattttgatatacctttttgaagtttgtacatttggacactaaattccatagaaaacagagacttgatcatcctttgaacaaaccactatctttcaaacctatataaagataaaatagtatggtgctctggtaggtgtgtccattgctttcagttattatatatatatgtatatgtacatatatgtgcatatatatatgagttcgatatattgtgatatatataacaattatgtatcttatgatatatataaaatatctcacaactacaccatttcttcgaactctctgccttttgcaattctaagtgaactgtctcaccaggattcctgccaaattctgaatttaaagtggtgtcatctgtatagttaccatctaacaaaggatttgctgaatatatggtagatagcccatgaaaatcttctagaaaatgtcataaagaaactgaactttgcatgtgttcactgggtttttcaactttatgttttttagaaccttcagggtttataaatctgacctcattttctcttcatgtcttgagcaaaataaacatcttctactattctgtgttgttgttgaccctgtatacagtgctgggtaagtaaattagtacagattatggggaattttgccaaagaatatattaacaattttgacaatagaattagactcttgagggtataacaaatggctcatggattcttcataaatcattttctgggacatggttttggaaaataaagctcgtgcctaacatgtttaaaggacatttagttaacaccaagttaacttaagggtgctgagaagactgctacagaattagtatttgtgtagaaacctaatagaagcttaaatagcacctcctcagagcaaccttctttgtctatcttaaagttttagtctatatctcatcacaggttttacttccatcattacctttatcagaatttatacctatcttctgtgtttattatctattaactcattaaaatattcactggtaggcgggtacggtggctcatgcctgtagttccagctacttgggggctgaggcgagagtactgcttgagtccaggaggtcaaatccagcctgggcaacacagcaagacgccatctaaaaaaaaagtatatatatctatccattggtattttgcctattttgcttagtatgtagttcattgaatatttactaatgtgtggctctcaaaaattcagctcaaaaaagagagaaactgagatgagcaatagttcaggcatatctgcactcttctgttgtattattatacccagtagtatcatgtggcatatgacaaacatttcagtcaacaagggaccacatatacagtggtggtcccataagactctagtggagctggaggtatataatagactatatcatgtaggtttgtgtatgatatgtaaggacaaaattgcctaaggacacatctctcagaatgcatcctcatggtgaagcaatgcatgactgtacttataaagtcacttagccacacttataaaagcagaaatcaccataaatcttttaggcttttttgcttatgtttcttagtgactaaaagtcaattaggagtacattagcctatttgttgcctagtcttagtctttattttacacttttatcctccctttgcactttgctcattagtaactcccaccagagaacaaatgaaaatataacactttatgattctgtgtaagctatggcagatcacctttggaggtaagttctcttgttcaagataggttgaagctgtttttgacgcttgtcttacacaatgaggtaaagcaagtaatttggttcctgggctgtaaaacaaaacaaaacaaaatacattaatagggaagaattgttccattcagaaagttgaaatctgaagacaaaacacctttttagactcatatgtctttaatgcagtttatataaagtatatctgagaaaattgcctctgactttttaaagctgaaccctattcttgccagcaaatgatggtatttgcattttttttttgagatgtagtcttgctttgttgcccaggctggagtacagtggtgcaatcttggctcactgcagcctctgcctcctgggttcaaacaattctcctacctcagcctcccgactagctggcattacaggcatgtgccaccacacctgactaatttttgtatttttagtacagacaggatttcaccatgttggccaggctggtcttgaactcctgacctcaggtgatctgccggccttggcctcccaaagtgctgggattataggcatgagccaccctgcctggcctagtatttgcattttgcaaacggaaatctaactgtcccttatcactcttgacaaacaacttgacactcttatggagaccagcacacttacaagacaaaatgacaataataataataataatacctagaaactcacacactgagaatggggcagtaaataataatagggaggatagaaaagtcagcatggcattccagatgagaaaactgaagcaagttaaactttctacatggtaaccgtgattatgtagttgatatacaaagtaatgactgtgggccttcaagaagaggttaaaatacattcattatattaacgagtgcatcttagaaagatttctttcaaaaagtagttgaagtttttttgctttaaggagtaaatctcaatcatctggaaatttaacttctgtggaatacctctttacatcttaaaggaaatgttaatgcattatattgaggttattattgcaatggaattttcaaaaatgtgagtgtgctttttttgtttctagaatctataagacacatatctgttctaggtatagtgtctactaagacaatttcacaatccaaaaaatagttggttagcaaggatatcaagtacaacacagagactagcaaagagggaaggctatgaaataaaatgcttatagatggctagtctcatatctctgctttattcctataaatgtatctcatgatatatgtaatcagaattatagttatttaatctcctccttttttgtccattgcctcttttaggtccatggttttttggtgaaatcattgatggcaaatttggttgctgcttttcctttgggatatttgttaatggacatttcctacaaggcagcataacatttataattggaattctccaggtaagaagtcagaaaagcaatttaagaacatcttggacttgtcagactaattgcataacagttatgaattaaatccaaaatccagaattaagtaccatagatcatctttcctactttacttgcagggcagtctttaataaaagcttcatttgcttttaaagtgcttcctaaactccttccaccactctcatgtaaacatctaaaatacatttttttttccccaagacagtgttctgctgtcgcccaggctgaagcacagtggtgcaatcttggctcactgcagcctccacctcttgggttccagcgattttcctgcctcagcctcctgggtagctgggattacaggcatgtgccaccatgcctggctaatttttgcacttttagtagagacagggtttcaccatgttggccaggctggtctcgaactcctgacctcagatgattcacctgccttggcctccgaaagtgctaggattataggcgtgagccaccatgcctagcctaaaatacatttttgtcatgaagtgtttataagaggtgaaagaagtttttgttgtttttgtttcactgtgctttttcattgacaaaaaaatgaaacaagggattatggtagaaaaagttttagatttctgagtaaaccaaaactgattatgatgatgaagaaggaaaatattttagagggaggaaactaaaaaatagacacattaaaaaaatgggtcagttattcagtggaaactgcattattcaaaaaccagacctgggctttcctagcaatgtacttgtttaggaaacaaactgatgtattaggtttacatttgattcctttaaaataaacacacaaagaaccttgatccatagaaaaactacataaacagatttgaaaagtatttatctaacagtttctttattttactcacctaatggagttagtggaccaaaatttgaagttttggaagagatccaaaaacattcaaaataagttcatggccttctaacagggcagtagaacatgatccaacaggattagagacagccaagtaggaaagacttctgcctagcaaacactgacccaagtccagaatattctctgcatagcagcattatatacatgagtaggtcctgggttcatttcagttttcttttcttttcttttctttttttttttttttttgagatggagtctcgatcttgtcgtccaggctggagtgcaatggcatcgtctcggctcactgcaacctctgcctccctaattcaagtgattctcctgcctcagcctcccatgtagctggggttacaggtgcctgccaccatgcccggctaatttttgtatttttagtagagacagggtttcactgtgttggccaggatggtctcgaactcctgacctcaggtgatccgcccgtctcggcctcccaaagtgctgggattacaggcgtgagccactgcacccagcctcattgcagttttctattatgttgatggaggctgtctctaaggagctctctcataccaaatgaatcctgagccttaccaaaaggcagggttttttcctttgtaaatgtttacattcatattctaataaatagtacactaataatggattttatgtatcatccagacccatgaatcccaaatctatatctctgatctagacctcttctctgcacttcaagtgcctctatatccaatggccacagatgtctaacaggcatctcaacttcatgtgatgtctctctgataggaacattatttccaccccaaacctgttcctctctgtttttccagttttaataaatgactccaccattcacctgatttctccaagatgtatcctcaattattccctttccttcataccctgtatctatttcaccagcaagctctaccttatttgatctgcttccaatgcatatcttgaatccatccacttctctccatttctgttttcctaatctaagttgtaattatttcttgcctgggtcttctccctgatattcttgcctccttactctcagcttaatacagagcatccagtgtgctcttttaaaaactttacaatcagctcacttacttttcagcttgaaatgctttgaagcagagcagtgatctgggtcctgccgactgccccaatttccacctggctcatgctctgcatgcacttccttaaagaggccaagacctctcccacctctgggcttttcatttgttccttctgcctagaatgcacttccctccgctgattcattcttgtccttctggcctctgagagcctttctcccagttaccttctcatgacccagttctttccttcattgaactaatcacgatctgtaattatattttttggtttttttttttgtctgtcttctccctgttagaatgtaagctctatgacggaccttttctaacttgtttgccattgtgtccccaacttggagcctagctcatgcctgctacataatgggtgctcaataaatatttgttaaatgaatgaatcatacagcagctcaacttggattataatttagatactctaatttatattccagtacttatcatgctacctcaaacaaaaatggaggtaagaaaaaaaatactgatagccaagtcctcccctcactccaccaaaaaagaggggttgttgtatgtgtgtgtatacatttactcagttcaattccagcttaacaccattgggtattaactgtgtatatgatactgtactacaagttgggacttcagcataaattaaatgatacctgcctctaagatgaataaaaggacatgggcaaatacacaactagccacaagtcagctgttgtgttataagcaactgtgcttgaagtaaattagctaacgccaagacagatagcagcatagtcttaggatccactaataatgcattattaagaccaaactcttccaaggacttgggagtaagctatggttctgttcttttccagctggcgttttttaacatccccttgatggcttacatgtgttggagcttgctgcagcggtgctttggtcacaacttcaggtctcatctccatcaaagaaaatacttgaaaattatgcctgttcacctacttatgctactgctgtacatctggcaggtttattcctgctactttctttatgcaacatacggcaccctagcttttttattctcccctttgcggacctggttgacactgctgacacctgttctcattcgttatgtgtggacactgaactccaccaagtttggaatcttcatggtgcagttaaaaagccacctgagctcctgaaggccatgtctcaccactggcagctgggcagaagcccagcctctgtgtctgtagcccaggcctctaccccagtagcaggtggagggccaggattggtgggtgagctttagggagcagctgctcgtttggagtcctggacgttggagggattacccactactgatacctgcagaatggactgcagaaaagtctcaaaaataatgcctttattccttccctccctaaggaggcaaagagttgatttacctttgtgaagagaaaacccttatctaggacatccacagggtagaggttgggtgtgtgtacgggagtgtctgaggcccagtgtgttttttagggttaccccatgtaaagcacttaccgctgtgcttggaattcagcagctgtcaaaggtgcaatttcaggggcagggaacctttgaggatctgggcccgaccctcactacccctgagatattagttcccaggcctgttttcccacaggattgtgggctctctgcttccttagtcggaagtgttttcaactaatcaaataaatgaatgaatgatgaataagaaagacggtgagcctgaggcttgcttgtgtagcctggcctaaggggcaagagaaggcgtggcctgtcctggcctctgagagtgggatggttggtgctgtacctcaggggacagggcggggcgggaggaggcggggccaggcctggtctctgataacgggatgggtggtgctggacctcgggcggggccgggcctcgtggcgggaggaggcagggcagggcctctgggacggggctggacggcttgttgacggaaacgagcccttgacgctgtggcccggaagtggagcggctgtcgcagtgcggctccggcagtggcagcggaggcctgtgtttgcggccttcggcaagcgactgagatggcgagcgcaactgcacctgcagccgcagtccccaccctggcttcgcctttggagcagctccggcacttggcggaggagctgcggttgctcctgcctcgagtgcggggtgagctgacggagttagaacgggcgacggcaggggcgggctcggggtcggggagaggccgggctcggggtcggggagaggccgggctcggggtcgcggagagggcgggctggggcggcggcggggagccgggcttgggcgagggaggtggctccgcttacctcagcttttccattcgccaccgttcggcccccacacgccacacccacaagtcggcgaagcccaggagaccaccgaggagtttaatcgagagatgttctggagaagactcagtgagtgcgcctccttccgggctccccttgcctcacttcctccagcgtcccgaccccttttcctcccgctgtcccccacggaggggactgctctcccccgctgcatcctttctgtgaggtaccttacccacctcagcacctgagagggtgaaatagaattctaacctcgacattcgggaagtgtttttgagaagtctcggtcggtaagggaagtcttccaagtccgtgcagcactaacgtattggcacctgcctcctcttcggccaccccccagatgaggcagctgtgactgtgtcaagggaagccacgactctgaccatagtcttctctcagcttccactgccgtctccacaggtgggcttcactttcgtggaatccttgggctgccgagttacaccttaggaatcctctaattttctttccaccttttgcacgcacgccaggagatttcttttcttcatctgtccagtgaggttaccgtttttacttcacaggattgttgtgaagaccgaattgccaagtgcagttcctggcgcggagtaggcaggtcttataaatattggttcagtctgaagtttatcctggttgtttcccttctgataattttttaagcactttttatttgctgggtgttttcacatacttgatggccatctgacagatgagcaaggaggctcagaagctcagcttaagatttaaaaaaaagcaggggggctagaatttaaatcaaggtctatctgatgtctaagctacctattctgttatactgcataataccctttttatattattttttatatttaatcagtaacatatgtagatagtacaaaattcaacagatatcaaagtgtgttaagtttacctttccacccactttctcatttttgtctcccccagttccttttgcattattccacgtatattctgtgcatatatacattcatatacatttatctgtatgtgtcagcttctttttacacaaatgatacataaacactgttctggaccttccaacttagaattactgcaaacagtgtcgtgatgaattacctaattctgtgtatgtgtgtatattggtagaaaaaattcccggaagtagaattgctagaacaaagatttatgcattttaaatattcctttattataaaactaatgaaagtaaacatgttggctatgaccacgtatgctctatgctcagtttttctagagttgtgtatgcttaatataggagtaagattcttttaaaatggcatattcattgccttatttgattttcatagtcaatcgttttaatttttcagtctacatatataggtgtttggaaaggatataaatatcttctgctgcatgtacctacagtgataaactctctcctcctacatacctttgagattttttttttttttttgagacagagtctctctctgtcactcaggctggagtgcagtggcacagtctgggctcactgcatcctctgcctaccgggttcaagcagttctcctgcctcagcctctcgagtagctgggattacaggcacctgtcaccacgcctggctaatttttgtatttttagttgagacggggtttcaccatgttgggcaggctagtctcgaactcctgacctcaagtgatccgcctgccttggcctcccacagtgttgggattacaggtgtgagccaccgtgcctggcctacctttgagatttgtgatgaggaaacaagagatgaattgtatgagagcacttcaaaagattcatggaaaatacttatttcaaaaagagtagttaatattaccttatttttcttatctgctaacccctttctttcaaatgcacttaggacttgctgctaaaactcactgcaagtaagataccacaaggaggcagcatagaactgattttctatacatgctcaggacagtagtttcactcatagatgaaaagttagaatttggatttatttgaaatatatacaaatattcaagtatatacatatattcaaataaatacatatatgtatatatgtgtgtatatacacacatacatacacatgaatcatcattgccttcttgagatctcaccactttagtcctactaaaagatgggtggttgttggtttttttttgttgttgttgttgttttttaaattccaatctgtatggaatgatactttaataaaattatgtgctcggatgttgaataaatgtcaaattgccataaaagtttctaaacactctcagtcactgcttatctcatccctgactggtcacaaacagtttgtagactggctccaacctggaccacatttgtatagtattgacttagaatttaacagaaaattgaggacaaggaagatgagaaagccagtgaccacctagaaggaaaatagttaacatggagcattgtcgagtccatgctagttacctttagttacatattctgattctgttaaaaaaagagagagacctggttaatggtttaataaccatggtctgtcagttggtctgtctgtctctctccctccctctcttttctgtaaagggccagttagtaaatattttagattttgtaaccaactacccaactctgcccttatagagcaaacacaactacagacattaaaaccagtgagtatggctgtgtcccaatacacttcatttccaaaaacaggcagtggggcctgacttggcctgaggaccacagtttgccagctcctggtctaagatatcatgaatatcttgggatacagagtatcaggaataagttttttcctgctgtttcttaatggtttattgagttgtcagcccaatatctactatatagctaactcctccctggtatgtgatgagtatagtaggcctgccttcataccaggacttcagaaaatgtttgatgatgctgtagaaatatctgccctaggccgggtgcagtggcttacacctgtaatctcagcactttgggaggccaagggaggtggatcacctgaggtcaggagttcgagaccagtgtggccagtgtggcaaaaccccatctctactaaaaatacaaaaaattagctgggtgtggtggcgggtgcctgtaatcccagctacttgggaggctgaggcaggagaactgcttgaacctgggaggtggaggttgcagtgagccaagattgcgccattgcactccagcctgggtgacagagtgagactctgtctcaaaaaaaaaaaaaaaaaaaaaaaaaagaaagaaaaagaaagaaaagaaaaagaaaagaaatatctgctctattccacagcagaagggttgaccactttgatctaatctgtttcctttttcataggaaacccagaagttctgtgaacaagtccatgctgccatcaaggcatttattgcagtgtactatttgcttccaaaggatcagggtaagccacataagtgttgcatttatcgtgtagatctttgctaatattgtggattatgtcttgtgacttttacctttacccaacttgaacatgtaactttctcccataaaatacagtgaaggataattttgtaatgtaagtgacttatataaacaagccattattctaagatacagatgctttgttcctatgacttcccatctcccctgccttgcctgactcataaggcttttaattctcacagccttctccctcttcaacccgttttaacaccacagatactggctggctctcagccccatatgcaggctcaggccatccttactttcctccacccatgttatatctcaccctatttctgaacatctgcataggttaaatggcctccagccctgcctgtagaatcatgcattgattataatcatgccaaaattataactgaatacatgtcatggatcttcagggttactcaagtggcttaaacttcaagtgtttcatctacagttgttaagagatcacggtccttaatgaatgaatacatggtgtcacggaaagattttgttccaaatctcttttgaagaaaacactaaggaatggcaggaggggcaagaaaatgccatggggatataagtaagacctgagttttgtgttagcatgtaggttaaagcatgtgggtgtacattaccttatagttctgtaatgcttagactcaggaaagcagatggtgcttctgaaaagaacaccaggttgcttattctttgggtttggccacagggatcaccctgagaaagctggtacggggcgccaccctggacatcgtggatggcatggctcagctcatggaagtactttccgtcactccaactcagaggtagtgatgccacagtttaggttaccagttattggggttccttgcctcagaggggaaaagctcattttaacagcaaagttactgacagctgagagtaatgaccagcaggaagaagctttttaggagacaggaacctaggttattaatatatccttactgatttctttccccagccctgagaacaatgaccttatttcctacaacagtgtctgggttgcgtgccagcagatgcctcagataccaagaggtgagtgaaagtgggcagtgggccatgtctgctggccaaagcaaagagacctcatgtctagcttccagctttgtaacatgtatttgaatttatataaacagtctagtgaaatatatatattttattaatgaaattaataggtaggtattaatactttttgtcattctctagttatcatacttctaaattccactcccccttgctgtggctgtctcttgttgaacaagtatggtttgttttcctagtcctaccccaagagtagtattatggagcacactgaagcagttatgaggtagagacagctaggccaaaacagtggttgtccaagaggaccatgatgataaacatcatgtgaccattttatttcttcttgtgaataaaatacaagctttttaaacccctatctagataccaggggatgtagtgagaattttttattaaacccgcacccttgtcaaccgtccttggcactcccatcaataggaacaatgtgattgttccttgcagtcataagaaaattgttggatttctcctctaattctagtgcttctgatttttcactcatagataacaaagctgcagctcttttgatgctgaccaagaatgtggattttgtgaaggatgcacatgaagaaatggagcaggtgaggggacctccatcattggaaggcaactccttgactagtagatgagaattaattataaagagagatttcctgagcattgaccagataggtcccattctcactactgtcctctgtcttccatctcccactgcttgttagtgtttgatttagtaccactcctctgtgttcccttactggacaaggagagcgagaacagggtttatgaagtgattcaactctgtagcccttagtgaagtggctggctaagatttttggacaactaagacatcgtggtaaaagtataataataggccccgccttttttttttttttttttttttgcattcacatacatcatggtatgtcttaggctgtggaagaatgtgacccttactctggcctcttgaatgatactgaggagaacaactctgacaaccacaatcatgaggatgatgtgttggggtttcccagcaatcaggacttgtattggtcagaggacgatcaagagctcataatcccatgccttgcgctggtgagagcatccaaagcctgcctgaagaaaattcggatgttagtggcagagaatgggaagaaggatcaggtggcacagctggatgacattgtggatatttctgatgaaatcagccctaggtaagcgggatccccacttgaaacatctgagcagcagcgttctgatttcaatttgtgttgtcacctcaaggttttcacagtttttttatattttgaaatttttcaaacctataggaaagtttaaaaagtaccttcagtgaacacccctatatccttctattagatttgcctgttgttcacattttttcctatattggtttatttctcaagagatactgtttcatatttattccagaatgttttgagagtaaattgcagacagcaatgacatttcacccctaaatacttcagtatgtatctcctgaagtactcttattcctactcttattatcacatccaagaaatttgacattgaatataatagtattatctaatattcagatttccccagttgtctgtatctaaaatgtcatataaattcagggttctgtcaaggtcccacattgcatttaattgtcatctctttagtctcttgaaatctagaacagttcctatcctttgtagtcttttttaatcaacattttaaaaagaaaccaggacagttgtcttgtaaaatatccaacaacctggattcacgtgattgttagttctcatttttgcaagaatatcatataattaagtgttttgtacatctcattttatcatattagggaggcacatgatgttggtttgcctcattattggtggtactaaatttgatcacttaaagtggtgctcactttagtaaaggtatattttactctaattttagcttccactgatgaaggctgcctgcctatattagttattaaactgatggtttcacatcctcacatttttgactgaattgatcatgcaccctactatgaaccaagggaatttcccccccagcttcctagtgaaatggggtatggttgtttcaataaagactggttgaactcattctgtattggttgcccagttgcccaattttaaaaactgacaggcatttctgggacagtttctcactgttgacatccatagttgtgtactagaaacaacctggctgcgtttttttgttaatgattacttttgttttctgctcttagtgtggatgatttggctctgagcatatatccacctatgtgtcacctgaccgtgcgaatcaatgtaagtactggctttgagggaatagctacagaacaaatgggcagaatttcactaatcactagtatttcctgtaagctatagggtacatatttattagtcacatttggatggaagtacaacagtaatgtcacagttcttgcatgcgtttggggttgataaatattcactgaagttgaattataatagccatgagctttggtagttctctcttccataatcacctgggtaatcattcagaaaagcccaaaggccttagaaaatgatgctttaaggctgggcgcggtagctcacacctgtaatcccagcactccaggaggcggaggtcaggagttgagaccagcctggccaacatggcgaaaccttgtctctactaagaatacaaaaattagccgggcatcatgcacctataatcccagctacttggaaggcttaagcaggagaatcgcttgaagccgggaagtggaggttgcagtgagccgacatcgcgccactgcactccagcctgagcaacagagcaagactctgtctcaaaaaaaaaaaaaaaaaaaaaaaaaaaaaaaagcttctttgaaaagaaagtcttaattacacggtaatttaggaacttctcaacttgaagtcacaagtttctaatttctagactaggcagcaattagattgaacttcagctgttcatgaagtagctggctgaggtcacatgtttctgatttctagacaaggcagaaataagtgttccagaaacatactctgttctaatacaaacacattgtgtgatttaactatggagagtcaactttcttataaaaatctgattttattgtattctttgaggttctgtgccctttactagagagagttctgttctctctaatgttattggaaagagcagtaaaactgccaaatggcttatattttacaattgaatgtatcaattctagtaatatttgataaattggataatggaaattagattcatcagatgtgtcttcatgatgtataaacaccttgaagtagaataggatccttttgggcattaacatttttttggcattaacttttaaaaaattgacttcctaagaaataaacatttttagcaatatgcctagtcagctatcccaaacatagtatctgctctagcaattttaaaatgtgtactgcatatgcatcttatatgtattgatattttatattaaacgtctccatcttatccttatattggtgttcttaaaattcttaatgcgctttttttttttttttttttttttttttttttaaaggaaccttagtcatttctgctttatattttgagctatcagcatttgggaccaattcaggttacattttcctttttctgtccttttttaaattgaaaatattttagatctaaaaaatcttattaaaatgttatagcaatagtattaataagatcttgctaaatagaaaagaacccgtaatcctgccaccctaacctaatcagcattttaaattttgcatacttccttcaggtcctttttctaaataatttttttattacttgggtctttaaaaatatttgaactcacctttttatggtagggctcagggtgaataacttctgtgtttcttttctagtctgcgaaacttgtatctgttttaaagaaggcacttgaaattacaaagtaagtatgaagacttctcagatagctttttgtgagtaaaacggaactgctgtccagacgttctcaactccctagctcccatttcaaggagtgggaaagggtgggtgtgggattttctttcagcttcagttgtggggcagctgagattctgcaaagaagcttccctttaaaaaaattttagttttccctgtgctccctcctgaggataggttttcccttgacatcctaataagtttaacttacttctttcctattctattcacagagcaagtcatgtgacccctcagccagaagatagttggatccctttacttattaatgccattgatcattgcatgaatagaatcaaggagctcactcagagtgaacttgaattatgacttttcaggctcatttgtactctcttcccctctcatcgtcatggtcaggctctgatacctgcttttaaaatggagctagaatgcttgctggattgaaagggagtgcctatctatatttagcaagagacactattaccaaagattgttggttaggccagattgacacctatttataaaccatatgcgtatatttttctgtgctatatatgaaaaataattgcatgatttctcattcctgagtcatttctcagagattcctaggaaagctgccttattctctttttgcagtaaagtatgttgttttcatt

SEQ ID NO: 3340 - DNA, 2779 bp, Homo sapiens
ttggtgttcagagtttcggttctcttttctgtgatcgtattacttatgcaaaacgagcccagtcacttgcgcggccagagaggggcaggtgctgggcggcggctgacgggcgcagcaccctaggcccagtgtctggctccagccccgcatccggcgccggccccgcatccagctctggccctgcgacaatagagtccggaagtgcaggcaaagcggctcccgggagcgccgcgcggtcctgcgcgggatcagcgagggccgcgccccggcgggcgggcggcatggctgcagtgctggctctcagggtggtcgcggggttggcggccgcagcgctggtggccatgctcttggagcactacggcctggcgggccagccctcgccgctgccgcgccccgcgccccccaggaggccgcaccctgcgccagggcccggagacagcaacatcttctggggcctgcagatatccgacattcacctgagcaggtttcgagatccaggcagagcggtagacttagagaaattctgttctgaaactattgacatcattcaaccagctctcgtcctagcaacaggagacctgacagatgccaaaacaaaggaacagttgggatccaggcagcatgaggtagaatggcaaacctaccagggtattctgaagaagacaagagtcatggaaaaaaccaagtggctggatatcaaaggaaatcatgatgcattcaatattccaagtctggacagcatcaagaattattacaggaaatattctgctgtacgtagagatggctctttccattatgtccacagtactccctttggcaactattcgttcatctgtgtagatgccactgtaaatccagggcctaagagaccctataatttctttggaattttagataagaaaaagatggaggagctcttattactggccaaggaaagcagtcggagcaaccatacaatttggtttggacactttacaacatccactattctttctccatcaccaggaatccggtcaataatgagttcggctatagcttatttgtgtggacatctccatacacttggtggactgatgcctgttttgcacactcgtcacttccagggcactttggaacttgaggtgggagactggaaggataataggaggtaccggatttttgcttttgatcacgacctctttagctttgcagatttgatctttgggaagtggcctgtggttcttatcaccaatcctaaatcactcctttatagttgtggtgaacatgaaccactagaaagacttcttcactcaacacacatcagagtcttggccttttccttatcctccattacttctgtcacagttaagattgatggagttcatttaggccaggctgttcatgtgtctggtcccattttcgtactgaagtggaatcctagaaactacagtagtgggacacataacatagaagtaatcgtccaggattctgctggaagaagtaagagtgttcaccacatattttctgttcaagagaataatcatctcagttttgatcccctggcatcatttattctccgtactgatcactacatcatggcccgggtcctttttgtgctgattgtgctgagccagctcaccattctcattatttttagatatcgaggatacccagagcttaaagaaccttcagggtttataaatctgacctcattttctcttcatgtcttgagcaaaataaacatcttctactattctgtgttgttgttgaccctgtatacagtgctgggtccatggttttttggtgaaatcattgatggcaaatttggttgctgcttttcctttgggatatttgttaatggacatttcctacaaggcagcataacatttataattggaattctccagctggcgttttttaacatccccttgatggcttacatgtgttggagcttgctgcagcggtgctttggtcacaacttcaggtctcatctccatcaaagaaaatacttgaaaattatgcctgttcacctacttatgctactgctgtacatctggcaggtttattcctgctactttctttatgcaacatacggcaccctagcttttttattctcccctttgcggacctggttgacactgctgacacctgttctcattcgttatgtgtggacactgaactccaccaagtttggaatcttcatggtgcagttaaaaagccacctgagctcctgaaggccatgtctcaccactggcagctgggcagaagcccagcctctgtgtctgtagcccaggcctctaccccagtagcaggtggagggccaggattggtgggtgagctttagggagcagctgctcgtttggagtcctggacgttggagggattacccactactgatacctgcagaatggactgcagaaaagtctcaaaaataatgcctttattccttccctccctaaggaggcaaagagttgatttacctttgtgaagagaaaacccttatctaggacatccacagggtagaggttgggtgtgtgtacgggagtgtctgaggcccagtgtgttttttagggttaccccatgtaaagcacttaccgctgtgcttggaattcagcagctgtcaaaggtgcaatttcaggggcagggaacctttgaggatctgggcccgaccctcactacccctgagatattagttcccaggcctgttttcccacaggattgtgggctctctgcttccttagtcggaagtgttttcaactaatcaaataaatgaatgaatgatgaataagaaagacggtga

SEQ ID NO: 3341 - protein, 641 aa, Homo sapiens
MAAVLALRVVAGLAAAALVAMLLEHYGLAGQPSPLPRPAPPRRPHPAPGPGDSNIFWGLQISDIHLSRFRDPGRAVDLEKFCSETIDIIQPALVLATGDLTDAKTKEQLGSRQHEVEWQTYQGILKKTRVMEKTKWLDIKGNHDAFNIPSLDSIKNYYRKYSAVRRDGSFHYVHSTPFGNYSFICVDATVNPGPKRPYNFFGILDKKKMEELLLLAKESSRSNHTIWFGHFTTSTILSPSPGIRSIMSSAIAYLCGHLHTLGGLMPVLHTRHFQGTLELEVGDWKDNRRYRIFAFDHDLFSFADLIFGKWPVVLITNPKSLKCGEHEPLERLLHSTHIRVLAFSLSSITSVTVKIDGVHLGQAVHVSGPIFVLKWNPRNYSSGTHNIEVIVQDSAGRSKSVHHIFSVQENNHLSFDPLASFILRTDHYIMARVLFVLIVLSQLTILIIFRYRGYPELKEPSGFINLTSFSLHVLSKINIFYYSVLLLTLYTVLGPWFFGEIIDGKFGCCFSFGIFVNGHFLQGSITFIIGILQLAFFNIPLMAYMCWSLLQRCFGHNFRSHLHQRKYLKIMPVHLLMLLLYIWQVYSCYFLYATYGTLAFLFSPLRTWLTLLTPVLIRYVWTLNSTKFGIFMVQLKSHLSS

SEQ ID NO: 3342 - DNA, 2366 bp, Homo sapiens
caaccctgcaaagtgcgcacggaaggtgttattaactccgttttacagatatccgacattcacctgagcaggtttcgagatccaggcagagcggtagacttagagaaattctgttctgaaactattgacatcattcaaccagctctcgtcctagcaacaggagacctgacagatgccaaaacaaaggaacagttgggatccaggcagcatgaggtagaatggcaaacctaccagggtattctgaagaagacaagagtcatggaaaaaaccaagtggctggatatcaaaggaaatcatgatgcattcaatattccaagtctggacagcatcaagaattattacaggaaatattctgctgtacgtagagatggctctttccattatgtccacagtactccctttggcaactattcgttcatctgtgtagatgccactgtaaatccagggcctaagagaccctataatttctttggaattttagataagaaaaagatggaggagctcttattactggccaaggaaagcagtcggagcaaccatacaatttggtttggacactttacaacatccactattctttctccatcaccaggaatccggtcaataatgagttcggctatagcttatttgtgtggacatctccatacacttggtggactgatgcctgttttgcacactcgtcacttccagggcactttggaacttgaggtgggagactggaaggataataggaggtaccggatttttgcttttgatcacgacctctttagctttgcagatttgatctttgggaagtggcctgtggttcttatcaccaatcctaaatcactcctttatagttgtggtgaacatgaaccactagaaagacttcttcactcaacacacatcagagtcttggccttttccttatcctccattacttctgtcacagttaagattgatggagttcatttaggccaggctgttcatgtgtctggtcccattttcgtactgaagtggaatcctagaaactacagtagtgggacacataacatagaagtaatcgtccaggattctgctggaagaagtaagagtgttcaccacatattttctgttcaagagaataatcatctcagttttgatcccctggcatcatttattctccgtactgatcactacatcatggcccgggtcctttttgtgctgattgtgctgagccagctcaccattctcattatttttagatatcgaggatacccagagcttaaagaaccttcagggtttataaatctgacctcattttctcttcatgtcttgagcaaaataaacatcttctactattctgtgttgttgttgaccctgtatacagtgctgggtccatggttttttggtgaaatcattgatggcaaatttggttgctgcttttcctttgggatatttgttaatggacatttcctacaaggcagcataacatttataattggaattctccagctggcgttttttaacatccccttgatggcttacatgtgttggagcttgctgcagcggtgctttggtcacaacttcaggtctcatctccatcaaagaaaatacttgaaaattatgcctgttcacctacttatgctactgctgtacatctggcaggtttattcctgctactttctttatgcaacatacggcaccctagcttttttattctcccctttgcggacctggttgacactgctgacacctgttctcattcgttatgtgtggacactgaactccaccaagtttggaatcttcatggtgcagttaaaaagccacctgagctcctgaaggccatgtctcaccactggcagctgggcagaagcccagcctctgtgtctgtagcccaggcctctaccccagtagcaggtggagggccaggattggtgggtgagctttagggagcagctgctcgtttggagtcctggacgttggagggattacccactactgatacctgcagaatggactgcagaaaagtctcaaaaataatgcctttattccttccctccctaaggaggcaaagagttgatttacctttgtgaagagaaaacccttatctaggacatccacagggtagaggttgggtgtgtgtacgggagtgtctgaggcccagtgtgttttttagggttaccccatgtaaagcacttaccgctgtgcttggaattcagcagctgtcaaaggtgcaatttcaggggcagggaacctttgaggatctgggcccgaccctcactacccctgagatattagttcccaggcctgttttcccacaggattgtgggctctctgcttccttagtcggaagtgttttcaactaatcaaataaatgaatgaatgatgaataagaaagacggtga

SEQ ID NO: 3343 - protein, 511 aa, Homo sapiens
MEKTKWLDIKGNHDAFNIPSLDSIKNYYRKYSAVRRDGSFHYVHSTPFGNYSFICVDATVNPGPKRPYNFFGILDKKKMEELLLLAKESSRSNHTIWFGHFTTSTILSPSPGIRSIMSSAIAYLCGHLHTLGGLMPVLHTRHFQGTLELEVGDWKDNRRYRIFAFDHDLFSFADLIFGKWPVVLITNPKSLKCGEHEPLERLLHSTHIRVLAFSLSSITSVTVKIDGVHLGQAVHVSGPIFVLKWNPRNYSSGTHNIEVIVQDSAGRSKSVHHIFSVQENNHLSFDPLASFILRTDHYIMARVLFVLIVLSQLTILIIFRYRGYPELKEPSGFINLTSFSLHVLSKINIFYYSVLLLTLYTVLGPWFFGEIIDGKFGCCFSFGIFVNGHFLQGSITFIIGILQLAFFNIPLMAYMCWSLLQRCFGHNFRSHLHQRKYLKIMPVHLLMLLLYIWQVYSCYFLYATYGTLAFLFSPLRTWLTLLTPVLIRYVWTLNSTKFGIFMVQLKSHLSS

SEQ ID NO: 3344 - DNA, 32248 bp, Mus musculus
  misc_feature (1)...(32248): n = A, C, G, or T/U
gcggttggacgcagctcactctgagctaggatatcgcctgccacctagcggctcgctcgcggaagagggcatgtttccacgaaagcaaggccaaaaagttcggttcacgttttttttttttgttttgttttgttttgttttgtttttttgtttgtttgtttgttttttttaacacctcccgggctgccaggatcccccttctcaggacaatgccaaggctggagccttacaaaataccgagtactagtgtctttttagtatagttcgtcactctcccacagctccacctgctagaaagaaatgcagagagagcagcgagaggaagctcccgttcagccatggaaagagatcaagtcacatacaggactaatgtgggtgacagagaccatggaactggagtcagtaaagagatcctggaaggcgtgcgcgtgtgcgtgtgtgtgtgtgtgtgtgtgtgtgtgtgtacacgcacgcttttattttgttttgtttttaactcctaaaactattatttcattatgttcattatgtttttatgtgtatgggtatttgcctgcatatatgtcttgtgtatcagatgtgtgcctggtgcccttggaggccagaagagggcatctgacctcttgaaactggaattacagataattgtgagccgtcatgtgagttctgggaatcaaccccaaatcctctgtaagagcagccattgctcttaactgctgagttctctctccactgaatgcaggcacctccttatctctgagttatgactggttctgtaagatggggaaggtggatggtggtgaatacagcccaaaagcctgggttttcagagtcggccttcatccagcactgtactggcttctctggctggaactcggctagcctcctggattctctgaacagtggcttctgcctcttgcttcacctttgaccttcctctgctttccacggggccctcacacctccaatgaatgctgatatattcaagtaacgtgttctgtggtttactcagtgtttggcacatgataagcactggagtcatagcttgtactgctgtgggttagacaacagatggacctggcctggaggctcagcagagaaccagggactgctctgtgcactaagtcagcccaaggctttgagtcggccatttttgtttgcattcttaattttgtgtcactggataaactgtgtccatcctttgagcctcctcagcatgtcaggatagaagaatattcctctatcctgcattcatagtagagccatctagggaagtagttctcaccctgtgggtctcgacccctctggatttccataccatacatcctacatatcagatatttacattatggttcacaacagtagcaaaattacacttatgaagtagccggaagtagccacagaaataattttgtggtgggggtgtgtgtcaccataatattaaagggttacaactccaaggaagaaaggaaacatagctcatagcttatatacataaggccacagcttccatcccagcacctaagaaccaaaacaaaaagctaagaattctctcacaccccatacccactaaatcagagcctctgggactgggaccagataaattgcaggttttttttaaagcttcccacgtgattccaaagtacatccaaggttgaggaacaatagatgggctaatcgttgaggctctcaaatgatagaaaaaaaaaaccccaataaacaaaaatcacatgagtaattactaaagatgcagccattgctcgttgagtaataagacaaatactgcatcaagagttctgagtgcggtgtgcaacatgcccaattaacctagggaattgagagtgtggctgtatatgtgtgtgcacgcacacatgcgcacactgtagtgtgcctgtggagagccgagaacagctccatggagtctgttctctcctttcacctgatgagcactcaggagatcaaattcaggtggccagtctttgaggtaagcagcttcccggggaacccctgtcccaaggggtgtgcgggagctctgggcgttcaggcctccatcgtgtcctgagcggagagtcagtggccatggcttattctgtgtcagtctctcatgacattgaaagacatttgtgttttgtttactcctgcttgcttggtgtcaaatgtcaagatgctaaaacttacaacagtgtcaactatttctgtgaactgtttcagaccaactagttctggtaaaaaaaaaaaaaatcaaagatagactataactgataaatttttagcattgtttttgttttggctttttaaaaaaacatttatatttatttatggtatgtgttagtgtgcttgcctatctgtctgtctgagtgcatgtaaggggggtgggagggctggggggcagtcagctaccagaagagagtgttggattccctgcagctggtgttacaggcgattgtgagatgcctagtgtgggtgcaaggagccagactccggtctctgcgagagaaccacacgaacgctcttaactgttgagccagcagttctctgccttgctttggcagggtcttgttgtgtgtccctggatggcctggaattcattatgtagaccaggatgaccttgtggcatatctttgacctctgccttctgaatgctggagttacagcattgtatcccgtttatttactacatttatactggaaaaaaaaaaacaaagcaaacaaacaaaaaaacaaacaaaaaaaacctgtgtggccactgaaggaatgagtgtgtgtgtgctgccaccttgtggtagaatgtgccacacacagtcctacctaagaaggctggctggtaattggccctggggcctgaccatgtttctgtggcctctgtatccttagcacccgttttgtttttcctaatacgaagcaaaaggaattgatatcagtagcatgagaaagacaagatatcaagactcaactctaatgcaatacagctttgttccctttccttgtgtttactgatggcccgtgcccattgtcaaggtactatactatccacggtaaaaagtgtgtgtgcgagtgcgtgcatgcgtgcgtgtgcgtgttcgtgtattcaagggcactcacgtcacagcacatgtgtggaggttaaagaacaactctcttgagtcatttctctcctctcagtttacgtggattatagggatcaactagggtcaccagcttaccaattttgatacaagccttttacccattgagccatcttgtaggccctgaggtttttgtttgtttgtttgtttgtttgtttttattttgttttaatggggacaatacttacctcatggtattgtgtggtggttttgtttgtttttctttttgaagtgccgtgggtcacacccagggccttatgtgtgttgggcaaatgttttaccactgagctgtaccccaaccctcacggggttgttataaaggtagaagacatagctaaattctggaaagttgttagcatgtgataaatgtgaccagggatgattcagaccttgctgccactgtgaatgagaccacctggggtggagccttccgacctggatggttctattgttctgtcacctgccactgctcttctctaagacaccgcttctgctgagaggttgaacctgtcttcctgagagagctgacagcctgtggaactggcgacctaatgctaacagctctggcagactagtgctaacaacttagcaacaaagcatcaagaagcctggcttggcagggagatgggcctcctccctttataagcacagactcttagtaattattgggccttgatctgaaatctcaggaacccagttcgtgtggccgagggcggctacaacctgtactgtcacagcactgacgtgaacacctcccactgggctttgctgtgctgtcccagtgcatagggcactgtgtgtccgttccccaggttctgctcatgtcccatctctgaccgtttcctgcattccctggtggaccaccagacctcttctctctgcctcagtgtcccctgtacttttccttgttcttctccacctaccctcctcctcccagtcgccactcccttagcctgagagtcccctcacaaacttcggtgtcagcattttccttaccttcttggtttccacatgaccgtacaacagcaccaacacaaaccgaagtcactctttagcctgcgacagtagtcagcttaaagaacaaaacataagagcccccccacccccccgcgcgctctccctgaaatcttaatggtatctcttccctgtccctcaggggccctttttgctgttgttgtcactgtaattttacatgttgttgtttgagacaggttctcaatatgaccccttggccagccttgagcttgcaagatccactttgctgcctctggagtgctactaacttggcctcttttgtactctattttaactttctgatctgtcttctatagtataaaagaacaaagaaggtctttgatgttgtttcactaaagctaagatgtcttagttattaatgtcactctggaggggtgatagtgatttcctggctctgaaaagagaaagattgatttagttgctgtaaaatgttcaacatcaggtgtgatttgtgaccccttcggagagtagaatgaatgaccctttcacaggggttggcctaagaccatgggaaggcacagacatttatattatggttcataacagtagcaaaattacagttacaaagtagcaacaaaaataattttatggttggggtccccacaacagtattaaagggtcacagcattaggaaggttgagaaccactgctctaaaggtttatgctatacagacaaatatatccacgtctttccacgatgtcagaatttgttaaataacaataaatgcacaagatttttgttgattttgttggctacaatttgccaagtagcctgaatttctcttgatagctggctgttggcaaacaagagggtttttttttttttattccacatatttacttatttttgaaaccgtgtctcatgtagccaaagatgaccttcaacttgtgatacttctacttcaagtgctgggattatagttgtggtatacagttatataccaccatgcctgttatacttgaaattaattactcctacaaactctcaaatcatacattaaacatcgcagtgattgtatctatatctgtgtatatacataggttataacatgggctggaaaggggtttaaaggacctcagttcatcaaagggttccaagaggccttactagaagcagaggcagagagctgatacaggcagtcacgggagggggttagactacacacccacctggagagctcatggtagcacacaacgccacaaagctgagccgcccagaagcagaagcatggaggacaggtacaggactaggtgcagagagatgagcagatggagaggtggacagacagcaatactagtgggctgcatcaagcagtggctaccaagttgaggggaagtttgagacagtaaggagcaaggagctctctgcctgtcagtccctggtcccgtacaccaagcagttagatgacaggttggcagggctgttgttactgatgtgttcagtgccctctggtaagtcctagtttatatggttctaaagacttatttctgagtattgtgtgtgtgtcctttgtgtgcaggagcccatggagagcagaagagggtctgggaagccctagacctggagttacaggtagtgttgagctctgactactgagccatctctccagctctctaatatggttttactatgcccatgggctaatatgtttccactttgtttatagttgacatcttttaagaagaaattattaggctgggtgtggtagcacacacctttaatcccagcactcaggaggcagaggcaggtagatctgtgtgagtttgaggtcagcctggtctataacagttccaggacagccagctacgtaagagagaaaaaatgaaaaaagaataaatgtttagaggccagagcaatggctcagtggtaaagtgttacttcctgttcttactgggatgtgggtttaattcccaggacccacacagaggcttacaaccatccacacctcccactccagggatctgatgcctcctacaggcaggcaagcattcatcgacataacataaagataaatattttaaagaaaggcttatcagtgtgtgcctcatggttgttgctggacaggtctgtggatatgaggttcagagccattcacttctctatttgccctcaaaatggagcccaatggagcttagagatgcagccacccaggacaaagcacagcctgaaagccattgttttacccagcagggaatagctcagaacagggctcagcctcacaggcaccatttgcttggctcttgcttcctaactgaagcaatgtccaaagtctacttaatgacaatgcatattgtgatgatttttaaagccttatcaaagttcaaaagacagattttctatctggctcttactaacaaaactgacttattagcacagcaggaaatggacacacatgtgttaactaatctccaattgagttctgatgaactaggattggtgaaagggtcacactcacaggactggttttaaagcaatctctccaaacagtaatggctaagaaatggctttaacttaccttagattcttttgcttgacatagacaaagagaaagggcttcatttctctacaaactttatattttatgaaataactttttttttttttttgactattggcaccacagaaatcttagcattaaaaaggaattttccttcaaatttgaggcaatcctacctcgggcaccagcatggtagggtaacagatgcgagctgcagtctgggaatcttcataaggttataaaagggacagttgagcctgggaaatgagactggactgtgcagaaggtcacccacctgactgtgctgccctgccctctcagctctaggaaatagatggacttgtgggtgacagagccatgtgggacaagactgaggcaggatggtgcttagtcacccccgaactaaggcaagcgttgcgacatacatcagctcagaacactgctaggctcaaggtcaggggagccccggcagctgttcccactctgctcactgcgtgccacccacgtgggtgaattcttaggagtgcggtgttgtcatgaactcttggacccaggcggtcagaacacggggtttcaatttcaagctactcactaagcacgttttgctctgtgctgggctctgtgctaaggggttggttaccatgatttctgaagccaatcaggtgggagagacagagctccacactgctgactggagaagcctggggccttctttccagagactcccacgagacaacgctggaattatttaggggcagtggtgaaggatttctctatgtagaccaggttgaccttgaactcagagatctgcctgcctttgcagagattgggatgtgtgctaccggggctggagagatgactcagtagttaagagcactgactgctcttcctgagatcctgagttcaattcccagcaaccacatggtggctcacaatgggatctgatgccctctcctggtgtgtcagaagatgatgacagtgtactcacatatatatacaataaataaatatttgagggaaaaaaaaagacgtgtgctaccacacaggctcaaatctgggattcttaacttcagtgcagaaaagaatttcaggatgagttgctgtgaagcaaactggagtttacaaagaagagattttctttacacagacttcaatagaaaggccctcttggacaggacaatagccaaccatagtttgggtgtgggcttctcaggaattgtagttaagtggcttggccacaactgcacacaattgcatgttgattttagaagcttttagaattccattgatggaagtttttctaagggctccttcctattattacacacacacacacacacacacacacacacacacacatcctttttggtaaatatgagtatagagtgagtcataagatgtcttggatatgattacaacctgatgaggtaaatcctgggtcacaaaggttattcaagggagattagatatatctttcactaaatggagctcctcatgagaaaactagaaaactgggggaaaggttatgtttccttaatccctattctaacattctctctctctctctctctctctctctctctgtgtgtgtgtgtgtgagacaaaacaaccttacagcacttattgttatataataatagcataagggctaccgaaacaacataaataaatgtttcagactgtgttcccattagaagacttttttttttttttcccaagacagggtttctcggtgtagccctggctgtcctgaagctcactctgtagaccaggctggcctcaaactcagaaatctttcagcatgatccagcccggctgttttcttgttttacggtgaatcttgtctgcatcatctaatgcgaggttcaagtactcctcaatgccaataatgcagccatctatccctctttcccaatattcacttgctcacacagccacaccggaatctgcctggcaagtatctgaacttgaggttggcggactgcaccatcaccctccacaccttctgtggccctggccctggtatgccatggttggaagtcacaaagaccatctaggaggaaggtcgcctcagaaagtgacttccagaactattttaatattccctttttccccccttcccttttgctccggccccgctcgcactggaccataggttttttatttgtttttcattaaggatggttgtgagccaccatgtggttgctgggatttgaactcacgacctccggaaaagcagtcagtgttcttaaccgctgagccatctcaccagcacctattttaatattcttatttgggatatctataaggcaaacttcacaatagatgttaactgtgctggaatacttgactctcagctggtgcaagacttcagctccaggctagcttcctttccatggcccctcaaactcccttctttccatcctgcctcaggttgtcccaggattctgggaagccaaccaatccaagggtttccttcccacactggacgccaatgagaacaagcaaacaatgttttcttagtattttaatatctcatgatgaagataacataaacattataaactttgaggacttcatgcctaaaccaccacctgcaggcaaggtgcttccagcaggtaaaggtgcccaattgaggacttgagtttgatccctgggacccaccttgtggaacacatgagattgggcacagcgacccccgtatgtatgtatgtatgtatgtatgtatgtatgtatgtatgtatgtatgtatatacatatatatatatatatgtgtgtgtgtgtgtgtgtgtatgcacatatataaacataaataagacaattagataattaagcaaatgcattcgataaaaaataaaacacaacatccaaagtttggaaatagtggcgatagctagataaagtgtgaatataattaacgtcaattttacacataaatggatatatatattttcccccacacttacgaaaaaagttcgagtgtgggtgaagaaaaccaaagctctaacaccttgtcaaaccagtcaaacctcggttctcacgcccactcccagttgaccacagctccttccctgagggtcacctcctcgctcctcaacctcagtctctccattagtaaaaacggggtggctgcaaagatgacctctggggctccgtggagtacagtttccggagtgtgcaaagatcaaggcagagttcccaagccacgctccgatcgccacatgctctagcaccagcgtggtgcggtcttaggctcggggtccggcgctgagagcccagagctcgggcgccacgcgcgtgcgcagtggtctcggggccctggccctgtgctgagggaggcggcggaaggcgggtgcgcgtggggctctacagaccgttgtcccctccgccagtgcccagggacagctccctcgccgcctcctttcccccgccctccccccctccccggctcaggtcacatctgcacagcgcagccggggaggggaggnnnnnnnnnnnnnnnnnnnnatataatagtaaatacttttttttaaaaaaaaatcagccacaaaaaaatcaaactcagacagctatggacctattatgcacaggtgctcagctacttggtgatcagaagaatgtaaattaaagcaagaacaccctgtcacacactatgtactgcctgtaataaataaaacagtaaagattggtaatcccaaattgttgaggttatagagaattaaaattcacatacctttcagacaggagtgtaaactcccccccctccccggctcaggtcacatctgcacagcgcagccggggaggggaggagccctccagcgcggaacccgggctctccactcggcccgcccctgaggggcgtgggagggcggggcggcggacttcggactccagcccccgacgctcctctgtccctgccgccctcagccatccccagcggtgagggagccatgtccgcgctactggggctccggcccgaggtgcaggacacctgcatctcgctggggctaatgctgctgttcgtgctgttcgtggggctggcccgcgtgatcgcccggcaacagctacacaggcccgtggtccacgccttcgtcctggagtttctagctaccttccagctctgctgctgcacccacgagctccaagtgctgagcgagcaggactctgcgcaccccacctggactctgacactgatctacttcttttccttggtgcatggcctgaccctggtgggcacagctagcaacccgtgcggcgtgatgatgcagatgattctggggggtatgtcccccgaaatgggtgccgtgaggttgttggctcagctggttagcgccctgtgcagcaggtactgcataagcgccctgtggagcctgagtctgaccaagtaccattacgacgaaaggatcttagcttgcaggaatcccatccacaccgacatgtccaaagcgatcatcatagaggccatctgctcctttattttccacagcgctctactgcacttccaggaggtccgaaccaagcttcgcatccacctgctggctgcactcatcacctttttggcttatgcaggtttgttattcctaccaaacacttggcagtccggagcctctatgaccagaggttctaagttctttaccgatacatttgagcaccccctgcaccctaccctgggccacttattattctaaccaccttgcagcctagcagttggagccaacatacagatcttcattcattgctgttttgaacacccagagaaagcagacactccggtgccgaaactaagatcgtggcagattactgccaaaggcttaaatagcccacaaagggattgttttaatgttagaaaggcagcttatcagttacggctctcatgccaaggtggtatagattgcttctgacactcttactgagaaacgatccggtcaaaaagttccttcgagcttaaagtgcacgattggtcagtagttgaccgcgaggagaagcagttctgtagctgcattcacgtcctacttttttcctacaaattacttgtcatattccttatgtggagttgcacgtggacttttaagtagactcccatgaaaggtgtgtttcaagtttaaactgttcttgttttgtttttacgagacagggtttctctgtgtatccctggctgtcctgaaactcactttgtagaccaggctggcctcgaactcagaaatccacctgcctttgcctctcaagtgctgggattaaaggcgtttgccaccacagtccggctcaagtttaaaatgtttttaaagatgctctttaaaaacaaatcattctcagctgggtgtggtggcacacgcctgtaatcccatcactcaggaagcagaggaggaggataatgttaaattcgttgtcagacagtgctaaatactgaaacccggtctaaggaaaacaaaacaaaaacaagaaaaaaaaccctccagaagtcttatttacttgtttactttcacaaagcttagctgcagtagcaattcaaaaattgtttaatgataaaatgcgccttttaaaagagtgtgtcatttaaaataatgaaatacttttactgggatgatagtggaactataaagaatgttttagaggcatgaatataaataaaggacacctagtgacagtcttaatacttcttgtactcattaaaagggaaaccctgcctagcactgcccttctgggctcaagccagggcacagtaaacaaaaccccttgacttccagtgtaggcttgacttcctggggcaacatgaaagacttcagaagtctcctttctttgaatctagcattgtttttttagttgacacacaggaaaacacattgtgtgggataagagaagtgggcacgtgctatttgaggggccagtgagagtttcagctaaagcagaaactcccgctgtgcatgagcagttctaccacaggagagttctgtgcttgcccattaaagcagcaaagagctgtgcaggtgattcatgcccgagatactagcactggacaggtagaggcaggaggaataaagtcttctgctactgactgggtttgggtcagcctgggctacatgagacctagtctttaaaaacaagcacacaaaaaataaaaatctgagattgttttataattaaaaagaacttaaggacacctagatctttctcacccccgaattgttcctcctgcctctgttgatagttgtgaagttggtgttcttcctgtacttttatgctcttagcaccaagttatgattccataaataatgtatttactactaactattcctgggctggggatgtagttcaaagatagaacacttgcctttatgcacatggcccttggctcttgtgaggggtaaaaacgtcttccaaaagagaagaaaagtgacccttggagttatttctaagtaagaggccaatggagaaggtctctaggatgtcagtttaagggtctgaagctcggctgatttcttgtcgtgaatactcaggactaaaccaatctctgatgcagacgttctcaacaatctctttccaaatctctggagttttaaaaatatacccattctggtgcagatctcagcatctaactgctctgggaaggggcggaggaagtgtcagagtttaaagttctgcccaggcgatccgattatgaaaccggttttgaacaatgctctagagtggacctgctttgtcctgctcagcagccactggctccaggtgcctatttagattgaagttaaacttcagcacttcagactgtatgtgcattcctccgtcacgcctcactgtactagagctggtggctctggtattggtcagggccggagactgcaggggtggaaccaaatatacactggttataaagctacatgcctttctgccaatataaaagagataagagtactccctaggtacctgttatagacccaatcactttgctaaggaattcatgggttaccgtaattctcacagttacccaggacgggcacattattcttcttcccattttaagtaaagcaaatagcactggggaaagaagtgacctgcctcaggttgcagcgaggctaggctggaaccatggctcacactgctgggtatcagtttaacgatgtaattatcagcatttccatagtgtgcacagattgcttggctataaaagggagtaaagttctgacatatgctacatggatgaacataatgttaagcaaaagaagcctggcttttttttgtttgtttgtttttgtttttttttcgagacagggtttctctttatagccctggctgtcctggaactcactctgtagaccaggctggcctcgaactcagaaatccgcctgcctctgctgggattaaaggtgtgtgccaccactcccggcttagaagcctggctttaaaaaaaaaaaaaacaaaacccaaaacaaatactgtgtgactctgcttccaagaaatacctgaaacaggcaaattaaaaaactgagaaagtaaatagaagttactgagagagcagggggtgagggtagactgggtgaggatgcactattgagtaggaataggatttgtgttggcagcagtgaaaaaaaaaacacatgaaaacttagggtcaggtgtggtggcttagtactcaggaagcaatggggagaggatcagaaattcaggtaagcctgggctatgtagtgactttgaggccagcctaggctacacaagatcctaacataaataggatgaaaaagaagacacgggggaaatgttgaggggctggaccacttttgggtaaagttggtgctgatggccacgcagcactgtgaatacaaagaacagcaaatggtgtgcgtgatgatgtgtgtgtatgaaaacttaaagcttttcattattacacaattctgttgccaataaccccttaagccctggattaagcaggtttctaaggttaagatcttatagagacatcactttgttcctatgtagtgtgaaaccccaagaggaggatgtgaaacaggtttggggtcctttctgtctagagtctgtagcctaaaagaacgcaccttggaaatggccgctcctggacttaccattcctgttactttgcagataataagtcatgactgttccaaagataatggactgcctttgactgctagagtgtctgataaggatttgagcaacagagcaacaggctcataggactgtgcattcactgcttagcactcgtttttaatgggtggaaactaagcctatggctggatatacgctaatcacatgctgtgcccagcactgaaggttcatatgtaagccgaggctacctatatgataccaattatagacacattggctttcctaacaaaagaaaaaagctctggccgggcgtggtggcgtacgcctttaatcccagcacttgggaggcagaggcaggtggatttctgagtttgaggccagcctagtctacaaagtgagttccaggacagccagggctatacagagaaactctgtcttgaatccccccccccaaaaaaaaaagagaaaagctctgtagctaagcagagttacgaactatttttttaagatggagtcttctcttgctttgtcactacctaggctgctttcaaactcaattggtccttccaagcgtctagagaagttaaatgtatttattttgtatgtgtatgtggggtgggggatgggtgtatatgcgtgctatagcacatgtgtaggggtctgaggacaactttagagagtcaaatatcccttccaccatgtgtgtccctcagactaaactcaagttgtcaagcaagtggcctcagcttcagagccatcttgctggccctacctctgttttctgaccagctgggattccaggcctgcaacaccaggcctgggattgttgatctatgagctattaatgaagactataagcaaatcttgcttaatttgggttttgggagaatttcttcagcaatcaaggtgactaagctgtgcgttcattttctatgcctaattagatactttagaatgccattttaaacatgtaagtagtctttattgctgtaaggtttttcatgtgtagaattttaaattatatctgtctgtgacataatgtctttgtccacctacaaacgagaagctatgagtagaggtcagacatactctccagagtctatacactaggactcagcacagtaacacccacaccaagtaagaagtaaggctattagacaagcctcccctcccccttctctccctcttccagtaatagtctggaggaattgaagtaattgtttacttcatgctcttactccttttgggtttttttagtcttcttccagccacaattgtaggtgagattatttgcccaaaaagaaaatgaactaagggtattgcacatggtctcatttaaaataggaaatgggggctggaaagatggctcagtggttaagagcactggctgctcttccagaagtcctgagctcaactcccagtaactcagggtggctcacaaccatccataatgtgatctgatgtcctcttctggcacgcaggtgtgcaagcagatagagtactcatacataaagtaaaaaaaataaaacaggaaatggacacaatcacgaatttacaaataaaaattagtttttacaaataaaaattagtttcaggactggtgagatttctcagtgggtaaagtcctttgccaccaagacttatgacctgagtttgatccctgggacccacctggtggaaggggacctgagtcctaaagtgtcctctgaccacacatcccccttaccatgagatcaaacaaaccaacaactaacttaccaacaactaacttaccaacaactaacttaaacaaaggtcccaaaccttttgctctcccggtgcgatttggtgttcggggccaggttgagttctcggtgtccttatctttaggatggacagaaccatctcagtggggacgaggaactgtgtttcaaacttgcaggttcttggaaaggtgcttttgtccttattcctctgccctgcagtttcccacagatctcctgtataacacggccatttttgcaggattgctaatcacactccatctcctgtaatcggcagtgcagcctgatgacagcccaacacagccagcagcactctgaggaggaacccccttcctgggggaatccacacctcaggcagcccaggatccctgccttctcagggagagctggactatgctggcttcacaggcatgcagcacgtccggctttgcttcttaaactcttgaatttttcagttttgcttaatccttagatagacctgatggtaagtgacaccatttgtgaaatggagcttagagagccacagagtgaatgagagcgagcacccaagcaggactgactcctgggaagcccacatctgtcctaagattgcgccccgcccatttctgcctttcatttatttattgaacgcataagtaatagcttatgaaaccgaacctaataattgtgtttatgtaagcatacaaaagcaccacatctactctctgtattctttctcagttgtttagtgtttatcttggagatttatgttcataaaaaattctctaatttcttcaaaatggtgcatgttattccaaaaaagcttgtctacaacatctttctggacatttagatttcctagttccttgctatgacctaacagcattatctgtgtcttcctgcacatgagtatcactgttattctaggtcaactgttctcagctgggaacatctgctgatatttgaggctttttgatagaaacaaagttggcaaggggcagggctaccagcatctagtaggtagaggccaaagatatcactaaatgccttagagtacacatggttgcctctaacaacaaagaattatatagtaaaacagcaaagtgcccagtttgggtttttaacacataagccacacttgatgtggattactgctttagttgttatagctgttggtatgcaacaacccatctccaaactctaaaagtagtaataactacttatcatttcccatgattctttgtgctttctactcagttgcttaatgatttctgtgtgtgtgtgtgtgtgtgtgtgtgtgtgtgtgctggaggtgtacgtgtgttgtggggtgcatgtgtgaggaacccagagggtgttgatgtactccttaattttggggtgagatcacttgtatagctgctttgtttcagctggggtcaaaagaactctggctcacagctggctgtcagcgcttgtcacctgacatctggaggaccctggttcccctccatggggcctctcctcctccagcagcttagaccactacttacaggttcaggacattgttccaagagagcattcagggaggcttccacgtgacaccagttcagaatgctacattcagaactcagaacgacctctgacctctgctgatctttgccaattcaagtcacagagccaaccctgagttgagggacatcatggtcctgtagcagttcccatggggctctgaagctgaggtcagagggttagagggtaagggaagtggacgagcttgagttttaggatataatcgactccatgatgctggacatcttcatataccacggcctgcacactgaggtaatgaaatcatgagagctgagttatgataataactgtccagggcacttgtctgatcataagccatcattaacactgcaaagatctgggagcctttatctttctgctcttggtgtttagtacaagggaactcaatttactttttgttttcgtggaaccagaaataaccagttgccaatcagttttcttgaacgctaagtaaggtagccaagtctcattaggtttaccattccaaaaagaccgttcaagacgaagggaatgttctcagatggcaccgtttattactgctgtggcatgagcagtaactgtgctgtcaagctggaaagatagagaaaacagccacggatagtttggtctctcgttcaatagcttcctctgagcattgctctgttgttctcagcctaggaaacctcactaggtaaaccctaggaaaagctcttaattcccaattctagtttactgttttatcaagacagtgaatatgctacagaagtctgtcagcgtcagactctactgtgtgtgaagcttccactgggaagaccagaaatgtcactcactgtcttggggtacgtcctgggtatttgcaaacgcactgccacaactctggggtgtagtgttgatcagtcatccagccttcctttccctgtgggctgtgtggtcagacccataaacccctaagcaatgttaagctggaacatgaatccaccgttgggcttcgtgcttaatgttcttaatgttgtttatttctgtgtgtgcatatccatgcatgtgcgtgaagaaggcagaggacgctgactgatcactctcaccctattccctgcggacaaggtttttgcaccgaatctgaagcgagtcattctggctaggcaggctggccagagcttccagggtccacctgtctccacccccgcttgtgcggttatgagctcatgcagcaatagccatctggggatctgcactcaggtcttcacactgcagcagcagcagcagcaccctggccctacaggccatctccccagccctcatttcttaacttgtctaactgctcttttggggatctgccattccgttgcttcttagggactctgctgatgagcagggacccagtggtaatctgtttttgtctatttcactttccactttaattcaaaggcgtgtgtgcactggagggtcctgggccactgtgctgtgctagctgctttgtttcagtcttgctttctttgtaacggacctctgtcttgtctttgctcacaggagggagcctcacaggagcattgtttaacccagcgctggcactttctctgcactttccgtgctttgacgaactcttctataagttttttgtagtatactggcttgctccttctgtaggtaagcatatttcatttactacatctgaaaggttatggcttttaaaaacctaatttatgtagagtgttatgcatgcacgagtgcacactgtatgtgtgcctagtgcccctggataccttggaactgttctacagatgggtgtgagctgctgtgtgggtgctgggaatagaaaccaatttctctgaagagcaaccagtgctcgtaactgacaagccatctctccagcccccaaattagattataaaatatttaaaaatatgacacacaagaatttcactatgtcaatttctaaagccagagaatatataaaacaggtaaaacaaaagcaaaaaccacttggctaacatgcttaaaagcattttaattttgtgcagtgtcctttgaagccgtatgtgcataggcgcatttgcccatctgtgcacaagtggaggctagagggtgatttttacgtctgtcactctctattttgaagacggggtctctcactggacctggagctcttctgtttagtcagactggctagccggtgagctgcagtatctatccatctctgccccacttccacgtgctggggttacaagtcgtatgctgccatgcctgacttttacaagggtgccagggacccaaattcaggccttcatgcttgtacagcgagcactcaatgagccaattccccagctcctgatgctgtgtttgaatcagggctgcaggtacagcttagtgcctgcctgataggtggggacagtgaagggtaattatttccatccacaatcttagctgggcctggtgtgctgcctgaaattctagttacttaggaggctgaggcaggaggattacaagtataaggcctgcttaggccacaaagcaattttaagtccagcctggacaacttactgaatccagtatatgagtctaaaagtataaagttaaaagggttgagggataccgctcagtggtagaaaacctgcctagtagtcgggcagtggtggcacacacctttaatcccagcacttgggaggcagaggcaggtggatttctgagttcaaggctggtcctggtctacagattgagttccaggacagccagggctatacagagaaaccctgtcttgaaaaaaaccaaaaccaacgcccccctgccaaaaacaaacaaacaaacaaacaaacaaacaaacaaacaaacctgcctagcattcacaaactcttgggttttatttctagtacaaaaataattactacatagtgaattcagaccagcctgtggtatatgagacttaccttaaaataataaaatcaattgatcaaaaattttttgctaagtaatttcccctatgaatttgtgagtcccaaaccaaatgttatttaatcctttaggtcgcttttcctatttgtcagagagcatcctgtgcaacagctctgtagtcaatagagcctctaaatgactcccaagtcccattcatagtaatgcagtctagatcaggacaggggtgtggcccactaagtgcctgcttagtatgcacgtcactggaggttttatccctgtatcagaaaaagaaaagttctctttttacagaaatcaggtaactataatgatgacatgttaccagcgtttcttgcttttatttagatatcagctaaataaaaattggcaaaacatctatataataaaaaaaatttataaaaattaagaatgaagatttaggtttggaggtgttgtcactcagtggtgacgtcttgcctaatgcacacagagcctgaacttgagtcacagcattgcaaaaataacaaacacacagtaaagcagtattaatatacacttttttttttactattccatatttaaagtcctaagcacggttttaggtattttatgtgatctgtaaaagccactatggtgggactcaggaagagcaagagcctgatgtgtgtcgaacgctctgggcaagcaggctgcgacagctgtcaggtttcctccctcggagcccctcctgctcaccagagatttgttcctttccttaatctctgtgtgctccactttaaaacaacaaaaacctcaaaatgctgtgagctcctgcctcccaagccacctttgaggcatggcagaagccctgcgactttacagaacaaatgactcaagcccaggggttctctccaagtgaggtgtgcgctggccccttgggcttcctcagaagcaacggcaattcctagacacgtggtccccgcccgcccacccgcgggccttggtttactttcctgctttgtcttccaggtgtgctgatgatgatcctcatgttcagttttttccttccatggctgcataacaaccaaatgactaataaaaaagagtaaccactcccaaagactcgaactaagtcccaggacagtcaagctggatgcgacaatctgagcaccctccaaactctggacgcctcctgcttcagctttctctgtggaaggtgtcttaagtttttactacctggacttcaaattactgtgaaaatgaggtagcctgtatttctcaagttaagacttgttctcgagtgatgtattaaatgctgctagaaaaggctcattcattaaacatctacctatcccaagtcattagtaactgtgatgaaaagaacaagagaaaatagagtgaagcgggggcggggcactggccgggcaggaccaagaaattctgtatcaaggttgcctctgaaggaggtgggctccagagctgcaggggcttactcgcagcctccacaaggtgctttccagccacagcttcttagtgacacgatcagtggtggcatcttttaacaggaaacttgttttggggaataccttttatatccactaatcttcagcaggtttcccactggtttgacacggggtctcccttgtagcctggctggcctcaaacgggcagggatccatcctttgcctctgcctcccaagagctgggattataggcagggatgcaccaccacaaccaggggtttctgctttgtttttgttttggagtaaagatacttacaatgtagcccaggctgcccttgaactcacatctcccaagtgctgggattgtaagtatgcattgctccaaccgcctcagtcttcctagattttaaatatattctaatacttaaaatatttaagcagacaatttcaaactgtcttaatacacacacagccaggatctgctcttttcgtgttcccaactgtacaccaccgccacctggagaagcaggtaggtgttctttccgtgttctttatttttgtaatgatacactgaaaagctcaggaaagctaatgccataatgaggaaatggattctaccctccattttacaagatgagatactgagcccaggtgtgctgtgtgactccccgacaccaggggcagatgcacgctttacccttccatgtcagcagcaaaatcctcctcagttatcagtgactggagaaaacattcaactttctcaattaaattttaaaactcagtattttctctttttcttctttgtgtatgagtgcatctatgtgcacgtgtgtatacaggacccagggaggccacaacagggcactgggtcccctgtagctggagttacaggtgatcctaagctgccatgggtgctgggaaccaaacttagatctgttggaagagatcctcgtcctaaccactgtgctctctctcaagtccttactagttagtaccttttgaagcttaaaaggccctttctccactccttactgaagtccacagtttgtttaactttaattttacttcattattttgtgtgtaaaatgtatgggtgcatgaatgttagttacagcatacaacagagatcagaggacatctccacggagcaggctctccgtctttaattgggttctggcaatggaacttggttgccaggcttgggttgcaatgccttaatcccgctaggccatcctgccagcctcaagtctaatttcaaaaaatccaggcaacaatactggtttttaagaggggttgggggtagaggatgagaaatgtgtaagaatgaacactcagtggctaagctgagtaacatgcactgtgtggggacaagcttacagttaggtgaccagaagctctgccgtgtactatgtatcacaatagtacttaagtgtgaggcttcagaactgtgacctgatacattcacaaagccccccctctcccagggatgtgtgcacccctaaacctgcctccaagtaaaatctttaaaaaaaaaaaaaaaaaaaaacattcttaacaagaggactcaaagggctgacaacacagataactacttttaacaggagtccggcctgcctgtatttaaaacaagttactttcacatttttttttttacacaaaaaattcatattttcagcttcttcaaagttgaggccacagttctatcctcaaaacactaccaaaaaatgactttaaacaaccctttgtcttccaaagcgaagctgagttttctctagttccacggcttctcatagaacacaactacttactatttcactaacatgcttcatggcttggagaggggagggctcgccactgtgaagatgccgactctctgaactcccccagtgactcagagtttgtgtccccaggttctgcttgtcctgcatccctctcagggaggccctttcctctcctctcgtctgtcctcactgctgcttgttgcttgtgttcttctaagattattattattattattttaagactttattttgggaaagggttaggaggtgcagccacctggagaactatgtcactggggtaggtaggttctgagtacataacctatccctccttgttttgctctggtgtgcatctgtggttaaagatataatctatcagtttttgttcctgccaccgtgtctgtcacttgtcataacggactctcatccttctggaaccgttaagccaaaataaatttaactctttcctccagtaaagaaagaaatttaatgtgtatatgtgaatatatgcagtgtgtgcaggtgcctggggccggaagaagcctggtaattgtgtggtgtgtgtgtgtgtgtgtgtgtgtgtgtgtgtgtgtgtgtgtgagaatatatgcagtatgtgcaggtgcctggggccggaaaaagcctggtaattgtgtgtgtgtgagaatatatgtagtatgtgcaggtgcctggggctggaagaggcctggcggatcccctggagctagagctccaggcagttctgaacttgggtcctctgagagagcagtatgtgcactaaccactgaaccacctctcatacctctccctgtaagatcttagtccctgcctctttgtggagcaaactcaagttgtgtcttggtaagtgaaacccacaaaggatccttccagtgtcttggcctctgagttccttggctgtctcttctgatagctgtgtctgttgttctggccaagttccaccttaactataagcttgtcattaccagtaaacaaaatctatgagctcaagcaatctaagctccatttctaacatccttccagctccctcactagtcagtcactagatgagccccagtgatctcaagtcctctcttctacttatggagcttaagtcatatggacaatcactgtcacaaacgtgcctgctatatccttagctcccttcccctctatcataacaacacacactaactacaaccaaatcaaatgcaactgtgtttattctatttgcaacagaacattgtccacttaaatgtccacttattttttaatgcctacccatccacacacatattttagcttcacagctgcagtagataatgcctcctgtgtgaaccagacagggccagtatgtttccattacaaaggcagaaagggctagatgatttttgggtttttttgcaatgtatatatacacatgaggccagccaatatagtcatgaatatagtgaggtcagacagggcaacggttaagaaactagtctaacattagcaaagcatgcatgccctgtaacgactcctggtctctaactttctttatggatctgttttattcttgcctttttgtctaattttttttttcccactgactttttgttagtgccacatctctccaacggcttcggatggactcaccactagaattttatcttcatgttgaacagtttaactatctgctctacacagtgtacttaacagctatttatttgggaagacttgcttttcttgaaaatgctgtcagccatgtgttgttcctgttgctaggactgatatttgcttccctctcctacccatctggtctactggaaagcagtcactccagcacattagatctgtttatagagcgcaagcaacagcctgcactgcaggctgcgggccctacaagaaaagctcctactccgagacgtttaactgtttagaggagtcttgatttcaagtttctcaggcgtattctaatctcaggggtgggttagttacagcctgtctgaggaagtcagtactaggccaggatgcagccaggctggcagtgcctacccacaacacaaagggccctgagtttgttccctgtaaccacctaagattgggggtgaaggcacatgtcggtaatcccaggctcagaggtagaggcaggagggtgtgaagttcacagtcatcttcaactacatggcaaattcaagcccagtctgggcctcataagattctgcttcaaaatatataggtaaatgaagtcagcactaaccttgccgataacagctattgtgctactttctaggcattgttgtaataagcaattcatacatactaatgattaataatctctaaaacaatcctgaaaattccaagcagtatcaattaccctgtatatactttccttctaagtgctggtatttcgcccagtatgacttctcatcttaaattttaaataataccagattatgtgtataggttttgcctatatgtgtttgtgcatcaagtgtacgcagttccttcagaggcaaaagagggttgtcagatcccctgggagagcagccagtactcttaaatgctaaggcatttttttctaacctcagtatgtttctgttttttaatgatagaattaaaaacaaaactactaaccctacttttttgggatatttcaacaagtcaaacttggaagggaagaaaggaccataagatcatacaagcagcacaattccagtaatactaaaaaattaagctcaaaagtaaaaaaaaaaaaaaaaaaaaagctaaaatccaatcagtaaatgttggcttgttgataattacaattttttgtttgttttgtttagtttgttttgagacagggtttctctgtatagccctggctgtcctggaactcactttgtagaccaggctggccttgaactcagaaatctgctgtctctgcctcccgagagctgggattaaaggcatgcactaccacaccgagccatttttttttttttttttttttgaaacagggtctaaatccctggctagcctggaactatgtagaactgactagccttgaactcacagagatcccctgccactgcctcctaaggcaggctgagtttcatttttaatgactttacccggctttcccttttcccctcacagctacggctgtaactgcctagcattacagaatgatagcttgatgcctggtcccttgccttgttgactcaatcacccctagcagcagagcaaccacagcaaaccccgcagaaggaagagtccacaaggatcctgaaaactgttccttcaggaagatacgcaaggaaatttctactgtcaacccatgaggtgttggcccccatatccctagaatataactgtgggtgccatttagactgatagcagagaaacatgcagaagggagtgtgtacttagtaccagcggctgtaggtactgagactgtattgttttggaaaacaggcttagaaagcacagttgaatacccatgtaacctgagtggtgcctcctctataagtgtgtgatgacagtagcactgcctcctcggaacagttcccgtcacacaccacatacggacgaacccagggcagtggctgccactcaagaggcctcagaaaagtttagtttcttcgcacctggcttactaacaaactcagaacttctgaaaaccctgtttaaaaagacacaaaagggagaacttttatttattttttttcttttggcacttattctgcaagatgagaaactcaatgaaaaactgctacaacaaccacgggcctgaggctgtcagcaggacctagcagctaatcaggctgacagctccaaattgtgcatagaaccttctttcaaaggccacagaaagtccaggtacacacctttaatcccaagacttgggagaccaaggcaggtagatctctgtgagttctagaccagtcagagatacataatgtctcaaaaacaataacaaaaaagggcctaagtctagaactacgaaattcagccttatgaatacccaggtgcctatggaaactctatagtgagggctgatgaacttaaaaactactcccaatccaggcagcatcagcaaggtctttatgttttaagactccccttatgaaagacttgctaggggctagtgagatggctcagcgtgtaagagcactggctgatcttccataggtcctgagttcaatcacatggtggctcacaacctcccggaatgagatctgacgccctcttctggtgcgttagaagtcagctacagtgtacctatgcatagtaagtacttggctggagcaagcagggactgagcgagtggagtagactggagcaagcagaggtcctaaaaattcaatccccaacaaccacatgaaggctcacaaccatctgtacagctacagtggactcacataaaatctttaaataaatctttaaaaaaaaaaaaaagaaagacttgctagaagcatacacatcccaacaaatggaactaaaattgagctggggcactggtttagtttatagattgccttccttgcaaatgtaaggacctgagtttggctcctaccactcaagcaatagtggggcagtgtctatactttcaatgttgagaggagtagtgtcaacggagggcctggaagacagaagatgcctggagcttgctggtcagccagtccaggttcagtgagttaacctcatagcaagaaataaggcagatggggctcagtgttaaaccgctaagagtattaagaggacccaagttcagttccccaaaacatcaaatagcccaggcccaggggatctggaccctctgtgatcccgtaggcacctgcactcatgtgcacagacccacacgcatatatataattaaaagtaaaaatgagcatggtggcacatgccttcaagtccagcagtaggagagcagagccaggcagatttctgtaaactccaggccagcatgggctccacacagagacggtctcctccaccaaagctcccctcagtactagtattttgtttctgtgctcatgtgctacttagctgaggatgacctcgaatttctgatcctcctgcctccacctcctgagtactggaatttataggcatatgcaaccaggccaagcttataaagtggtagggactaaacccagggcttcatgcagctagaccagctccaccaactaattcacacccctcgcccccgcaggactttaaaacgttactattgttatgtgtatgggcgtctgtctgcatttgcatgtgtagctgaggaaaccagaagaggctattgagatccctggaagccagcagcatatagcagctgtgagctgcccaacacagaagcagaggaactgaatccagctcctctaaaagagcagcaagtgctgggctggagagagggctcagcagttaagaatacttgctgctcttgcagaggacctagcgtcagtttccagcatcctcacggccgttcataaacaactggaactccagttcctgtggttccaacaccttcttcagacctccatgggcaccaggcacgcacatgatgtacgcaggcaaaacacacatacatgtacaatttaaatatcttagtcttttctcattaatggttttactcaagagcaaaatcacagcgatatagaaaaaaacccagatttatttgttaactattacaaagacaaaatatcattgagagtactttgcagacttcatttcagattatttattctgtgacagaaagcgaacgttaagagggtggacagtcaaggacctaacctaggagaacataacagagctgatggtacatgaagaataacagaagctagcacacaagtattgcgagatgtggctgagccccaagtagaggacccatgcctctgtggaaaatgctagcggctgctccctctgaggcctctgctttttaatctcagggataagagttctcctgaatcccagagacatctaagcttccgcacgtcccttccgcccagtgtgagctctgtgcatttcaccacataggcgaatcttgcagctgacagacgcacacagcaaaggcaggactcagaggccttctcagaacatacacaggaagcttgggggaaatgagaaactacaaatacccgttcagttaattcacctttgttaatagaggtcatacatagtctcttctgctggtgacagcttgctgtctcattatagtttgacttgagaaatgagttttggagaagaaaaatgcctttcaccagccccattctggagtgaagaggcaccacgttcttgcctacagttatgagcagaatctggaagacaaagggctcacagttattattagtaattgccactatttagtaaagccttggagggctccagacttgtacctcaggccttgtaatatccctgacaagcaactatgtttccatcttacagacgaggaaactgagaaactggcagcacgtgtgcacatgcatggtgagccgtgaccctatgacccacgtgtactcttctgtacctacctcatgcacccaggtttgaacatgaacactctagcccttcttcaggctttaaaagcacatacaatcttttttttttttcgagacattggtttctctgtgtagccctggctgtcctggaacttactctgtagaccacactggcctagaactccgaaatccacctgcctctgcctcccaagtgctannnnnnnnnnnnnnnnnnnnctctgcctcccaagtgctaggattaaaggtgtgcgccaccacgcccggcagcacatacaatcacatacaatgatcaaaaattacactgtttagaaatcatgtcaacttccagacaaacatgaataaaatttatgagtagaacatctatttttattttattttttcccactgagcagagagaataaaatgagcacaaaacaaatcaagagctcaaatctgtagcaactttatggttattttaccattacaaagagtccaagaatctttgcaagagattgcagttgcatcccactgtgtaaacattagtgatgtgccaagtgagtctctcatgccagctgcaaacagaatgtctctctctcaacagtgagagaattattattattatgagagaattgtcagagaaatatggaaaagccagagcaagggaaaaaattgccatctaggccaataacacacaaatgacagctactgcccccttccctccaaaagcagctaccactaacatgacgataagtaacagaggtgacagttctggttctccatgacaaagaaagatcaacttcaacatctgggcctgtgagagctgaacactaactgggcaccaggaaagctagccagtgatgttagcagcagagagactctgctgactacagactacacacaagtagcaactgtgcaaggaagagatataaatcacagaatcacagaatttctctaaggttatttttttgatagctgcattagaagaaaacagagacttataattcatagttagttttacaactgcagtaatttggaaacacagactaaaaaacataaatctgccaggcagtggtggcgcacgcctttaatcccagcactcaggagacagaggcaggcagatttctgagtttgaggccagcctggtctacaaagtgagttccaggacagccagggctacacagagaaaccctgtctcaaaaaaagaaaaaaaaagaaaaaaaaaaaaaaaaaagaaaccaaaaccaaaacaacaacaacaacaacaaaccataaatctgtatttcttttatgtgtgtgatgttttgcctgtgtgtatgtgttctatgtgcctgtggaggcaagaagagggcatcatgtctttgggaactgaacttagagatgtttgtaggacaaagcccatgtaatttccagtcaccagagataggcaacatttttttaagctgctacctttatagaattctcttgaattatgaatttttaaaatcaatcatttcagggatcttcatgttgtaacaagaaagaataagctactcactgtatagtaggtcagccatcctcagtgatccacatctgcatcctcaaactgtccggcaacagttggtgtggtttccacctccatgccatctgaacagaaaggggttgcatttcaggataggta

SEQ ID NO: 3345 - DNA, 1350 bp, Mus musculus
cggaaggcgggtgcgcgtggggctctacagaccgttgtcccctccgccagtgcccagggacagctccctcgccgcctcctttcccccgccctcccccccctccccggctcaggtcacatctgcacagcgcagccggggaggggaggagccctccagcgcggaacccgggctctccactcggcccgcccctgaggggcgtgggagggcggggcggcggacttcggactccagcccccgacgctcctctgtccctgccgccctcagccatccccagcggtgagggagccatgtccgcgctactggggctccggcccgaggtgcaggacacctgcatctcgctggggctaatgctgctgttcgtgctgttcgtggggctggcccgcgtgatcgcccggcaacagctacacaggcccgtggtccacgccttcgtcctggagtttctagctaccttccagctctgctgctgcacccacgagctccaagtgctgagcgagcaggactctgcgcaccccacctggactctgacactgatctacttcttttccttggtgcatggcctgaccctggtgggcacagctagcaacccgtgcggcgtgatgatgcagatgattctggggggtatgtcccccgaaatgggtgccgtgaggttgttggctcagctggttagcgccctgtgcagcaggtactgcataagcgccctgtggagcctgagtctgaccaagtaccattacgacgaaaggatcttagcttgcaggaatcccatccacaccgacatgtccaaagcgatcatcatagaggccatctgctcctttattttccacagcgctctactgcacttccaggaggtccgaaccaagcttcgcatccacctgctggctgcactcatcacctttttggcttatgcaggagggagcctcacaggagcattgtttaacccagcgctggcactttctctgcactttccgtgctttgacgaactcttctataagttttttgtagtatactggcttgctccttctgtaggtgtgctgatgatgatcctcatgttcagttttttccttccatggctgcataacaaccaaatgactaataaaaaagagtaaccactcccaaagactcgaactaagtcccaggacagtcaagctggatgcgacaatctgagcaccctccaaactctggacgcctcctgcttcagctttctctgtggaaggtgtcttaagtttttactacctggacttcaaattactgtgaaaatgaggtagcctgtatttctcaagttaagacttgttctcgagtgatgtattaaatgctgctagaaaaggctcattcattaaacatctacctatccca

SEQ ID NO: 3346 - protein, 267 aa, Mus musculus
MSALLGLRPEVQDTCISLGLMLLFVLFVGLARVIARQQLHRPVVHAFVLEFLATFQLCCCTHELQVLSEQDSAHPTWTLTLIYFFSLVHGLTLVGTNPCGVMMQMILGGMSPEMGAVRLLAQLVSALCSRYCISALWSLSLTKYHYDERILACRNPIHTDMSKAIIIEAICSFIFHSALLHFQEVRTKLRIHLLAALITFLAYAGGSLTGALFNPALSLHFPCFDELFYKFFVVYWLAPSVGVLMMILMFSFFLPWLHNNQMTNKKE

SEQ ID NO: 3347 - DNA, 103310 bp, Mus musculus
  misc_feature (1)...(103310): n = A, C, G, or T/U
aagacctggctcttggctggctggaagtactgagtggacatttgacctgtaaaagtgagcaggtattattgtatttactgtttatcagcaagcctacagaattatggaattcatgacacttccatacatatgaatgcacatgactttctatgggacatctttgaaattaatatagagaataaaaatgaaaaccttaacatggagcaaggattgtccctttgcaaagggacagctttgtttctcttttaaactttgtcatgtctgctttgccctttctcgatctcattctctcttcttcatttttaactttgacctcttggcatcttctctgtacctgaccattctggaatcttctcttttacctctcattttaagtatacaaagagtcaagtacaggttttaagttggttttagaagtgggtttgctttgaaaaacaattgaaccctataagagttgggagtgtgtgaaaaagggtaaaatagaaaagcctaggctggtatgggttctgagtgacagtggctcctgacctgagccctggtgaatgaatggctggctcttaggttctacactgagatggctgttcagggctctatgagctggagaaatggtgaagaaatgtgattcatattaatattattatggcatcttgtcagcttatagaagcaccttatgagaactattgattctactttcagtctctttttgggcaatttcactgtgtatacaatgcagaacattttatttatttatttatttatttatttatttatttgaggcattatgtgaactggagcccaggttggtctcaaatttatggtagtcatgcttgagtgctgggattacaggtgtgagccatcatacctggctacgtgttagtttaaagaaatataggtggctacgggaagcagaggcaggcaggtggatctctcttcaagttccaggccagccagggctatgtagtgagaccgtggctcaagaaacacagacaaacaaccacaaaaatagaagtctaaatgaagaagatagaagtatggaatcagtagggttctgccggaagtttccatcctgctgaagtgaaaagcttgtcctgacattcatcaaagaaagctaaacagtccagtttttaggaagatgtggctctaacgcttgggaagtggagataggagcatgagaggttcaagggcatccttggagatttgaaggccagcctaggctacttgagatcttctctcaaaagatgagcccaccagggtaaatgttgcctgtccttaatcccagcagttgcaaagtatgtcacacctgcttctgcatgattacgtttggattgtgtttcacatcgatgcacattgttttcctaggggagggtgctcggtggaaccctgtttgctaactcctcttcctgtggacacacctgtgtttattctgtcaacattttcttagtaaatttgagatggtctaacagttgtgttggttgatctgttgaatttttttttttttttgagataggttaatttacatagttcagtttagacttgaagttttaatactccctccaccagtactgggatttcatcattggcccctcctaccatttaagagggggatcttgctattttgccagggtagccttgaactgtgtcctctaccaatcttcctacctcagccactgaaatagtagacctgcaggtgcacagcctcagctttatctcttgctttatctgtgccccaagttccaaataaatatatatatgtatacatacatatatacatatgtatacatatatacatatatatatacacacacacacatatatacacacacacacacatatatttaaatctctgtctttcttctcaccctttttgtgagaatactggatgttatagtcctgagagtgcagtcagcttctctggccctcctgtcagttgaagatctctgaggtgtactaaggatttagtacaggaaggacttgccctcactttttttgggtggggggtaagggggcggaagtttcaaatacttagccttccttctagctgtgctgagttttagggctgctgaatttgatgtcattttatggcatggcagcctatgactgtctgacagcattggctggctattgagtggcagctggctcctggctggaactagtcaagtttgtgcagtgtcagagatcagagcggcgtaaggtgactggttgtcctttccctatttgtgagtcttcctcaagttgtcaagaaagttgctgtcactctcagttacctaagtcggccctgggagttcatgaatcagtttaggtaggtttccagccgaagctaacaacatcaacattattcttacatgctgactctgtatatttcagccccgtctccaaaggagatgctgttcttttgttaaaaaagaaaaagatttattttttgttccttgtaagtgtgtgcgcacggccattttgggcacactgtatgtgtgcatgtctgtgcagctgcccatgggggctggcagctagaggcggtgttttcccctggaactggcattgcaggcagttggagctgcttggtgtgggggttgaggaccctactcgggttttctgatggaacagtacatgtttctattgcaggaaacgtgtttgggggactagtaactctttacattttcgagtgcctttaaatcagctggctaagatgctgtttgggtaaagtgtgcacattgctgtaatgtttacacccatagccacagatcagctgctctcttggctcctcattcttacacctttgcctggggataggattttttttcttgggatgtaacagcaaaaggaagccatatatcggcccccacctctgcccatttccagctgggtgccatggcaacagagagcacgctgggaatggggggagctctgcttacagttctggggatcaaaccagagacccaggacatggcagacaagcactctaacattgagctgcacctcctgctggtgtttgtagggtcttgctaagtagcacaacctggccttgaaccatgggtacccctctagtgcttcagatgataggtgtgtgtcgccaccccagcgccatattggatgttaaccttcgggtgccagaactacctacatagcacaggaggtccaaggtgcctttctcaaataggaattggcggtgggggactaaatggatattcttagctcttacaagttatttaaaacattgtaagtggagctgtatgcggaggtgtgcacctataatcccagcactaaggagacaggcaggaagactgccataagtttgaggccagtctagtctatgtgaagagttttaggtctgcataatgacctagaactgggaaaaaaaaaaaacccctgaaatcaaaatgataaacagtaaatataatatacttttttcactgtcagcttggttggatttataatcaccatggaaacacatctctgggtgtgccagatatttccagaaatgtttaactgaagagggaagataaacccgacctatgagggcaaagtttcatggatcaggtcaaattgattcaaaaggcaatcaggtcgagcacctgcactactctctgtctgcttcctgacttcggatccagcatgacctcacactcctgccttgccttcccgactgtgagccagataacagctaagccttcttccctgtcactgcattgagaaaggctgatctgggggcgggggagggggcggtcgctaactgtggttctgatcatttctgatgctttctgttctctcctctctgtgtccttgcttctatattaatctgggaggttttcttgatgacatatacttcctcttgggtcttttgaaagaggtgaatgttctgggtgttagggacagtgtggtagaaagatagaagtggggagacttttaaaggagtttggattggttgcaggagtctggaaatacagcttagctgatagattattcacctagcatagacaaggacctgtgttcaattcaggagaacacacacacacacacacatacacacacacacacacacacatgcacacggtagaatttggctcctttaggtaacctaggaaaacgtagtggataagaatgatgaagtcaaaagggttcagaacaagaaatgggccgggcagtagtggcccacgcctttaatcctagcacttgggagacagaggcaggctgatttctgagttcgaggccagcttggtctacagagtgagttcaggacagccagggctacacagagaaaccctgtcttgacaaacaaacaaacaaacaaccccaaaacaaaacaacaaaacaaacaaaaccaagaaatgggctggacctggcggcacacagctttaatcccaacatgaattccaggcagacatcttgtattaggatagcctgggccatcctgggctatacagtgagactttgtcttaaggagtggggagaggaagaaagagggagggacagagagaagtagggatggctggagggagggaggaagggaggaaggaagagaggtgggggaggacatatttaatttgatttgggtctttaaaggagaacagggcagccgtggcattatctgctgtttggtcggtgcataaagcaaattaaatagagccaatccttgtcctcggatcctgctacacaatgaagtacttagtggatattattagaggagttaagatcttttaaatagaatgaggaagtaatctgtatgcaatcaggcaggtttagtttggcatgcctcttctgaatgctaattccatacagagagtggaagcgcagagcacaggcctgaagagagtcgggattcagtgcgggaggtcaggccagccccccgcccccacttctgttaccttttataaagaatcaattttggcatcaatgctaaatccttttgattcaaattgctttcatgcagagtgcccagtgtttatttctgttcagactgttacactgacacaactctcatcgtaagctgtagtgagccttccgggaacatggaataaattttttgcataaacctaaatgtgtagtatttttaactttttaaaaacttttattaatttatcatcatcatcatcatgatgtgtgtagatcagaggacagtttcatggagttgattcctttaacatttctgtgggtcccacagattgaactcagagtcttcagggctcccttggccaggctacaaatgtctttatctgctgagtcatctgactggccccaggaagtgatttcaacttggtaaaatttcagaagaaattgttctggtttttgagattcagatctttggaagctgttgttttagagcttttgaccatcgactgtaacctgtagttgctcaatacgtcagagagactgccctagaggaaagacaggatacacttgaggtaggtcagcaggcttactcctcctgctatgtgtggcggcagtggcctttccatcagccaaaatgaatcatatggctagaccggatgccagcggagatgatgatgtgtcatcctcatcagtgtccaggaaaccatggcaacaggtagagatcaccatcctctcctcagaagggagcaatgttgggactcacagtgagatccgccacagcaccactcggcctggaacactattattatgagtgtttatctacatgtatatacatacatgtacacagtgcatgtttatctccatgcaaatacatacatgtacatgggtctcgtgctcagggatcagaagagggcgttggatccccctggatctggagttataggtggttgtgagcagccgtgttggagctaggagttgaatctagggtctctacgggagcaacaagtgctgttaagtaatgggccaagtttctagccccaggcacttttgaaggatgtgtgcacagttcacagaacagtagtacatgcttgcacagaccaggaagattaagaaacataaacagtgcctttgaacgaccccatgcttttataccgttgctcaagcaaaaccactatcatattactagggttggatcctctcatggaaccatcccaatgtatgtctctctctctctctctctctctctctctctctctctnnnnnnnnnnnnnnnnnnnnnnnnnnnnnnnnnnnnnnnnnnnnnnnnnnnnnnnnnnnnnnnnnnnnnnnnnnnnnnnnnnnnnnnnnnnnnnnnnnnnnnnnnnnnnnnnnnnnnnnnnnnnnnnnnnnnnnnnnnnnnnnnnnnnnnnnnnnnnnnnnnnnccccccaactccccgtgtaaagcatggggtttcttccagggtatgtgcttaaggttcaggtcctagcttgtacgatgtatgctgcttcagttagtagattgttccaggttgttccctctttgactaggagtgtgcatattcacactgtttacgtgaaaattctcattctggtttggtctcatgaagacagaccagattatcggatgtattagaaagtgcttctcacacttgatggagtatgcagatcaccagggatattagggaaaatgaaggttctgatttatatcctctcccccactcctctcctttattgagacagggtttcactatgtagctcaggctatcctggaacttactatgtagaccaggctggccttgaagtcaaggagatctgatggtctctgccccaacagtgttgggattaaaggtgtacgtcaccatgccccagcttctctctgtactttaagtccgtgtctggttacgcaggcttatgatcctaactactctggacagtgaggcaggaggattacaaatttaagatctgttttggcaactttgtgagactctgtctcaaaccaaaaaaagtgaaaacagttggggtgatatctcagaggaggaatgctcacacaacacacatgaatagctgtgttcagtcctcagtgccacagaagctctcaaactgcttagaatacttgaaaaaatatacatggcacatcttttttttttaaaaagatatatttattatcataaataagtacactgtagctatcttcagacacaccagaagagggtgtcagatgtcattacggatggttatgagccaccatgtggttactgggatttgaactcaggacctccagaagaacagtcagtgctctacctgctaagccatctcagcagtcccctgaatagcacatcttaatcaccattcaattgctacagacagtcaccatgaccaaggcagttcttacaaaagaagcatttaatggcttacctatagtttcagagggtaagtcccttaccatcagggcagggagcatggaagcaggcaggcaggaatggtgctggagacagagctgatcagcaggcacaaagagagacacactggccctttggaaacctcaaagcccacctccagtgacacacctcctccaacaaggccacacctcctccaacaaggccagtccttgtccttccctgacagcttatcacctggggacaaaacatccccagattggaggccagtttcattcaaagcactagagcttataaattgtgtgtctactgtgttgatcagggactgtgggcgagagcagccagcagtacagattcagtacaggtgcttgttttcccaccattgagatggagctcatgtcgcccaggctggcctcaaactcagtacattgaggatgagtctgaacttttgattctcctgcttctacctccttagtgctggggttgcatcatgtaccaccacatctagtttatgtggtgtcgggcctcagacctaggccatagtgcatgtttaggcaagaatcataccaataagccacatcaccaaccattgggtaacggtttcctccaaatgttttccatctaggattggctgaatttgcaggtgtgtaacaaccctggaacatggaggtccaactgcagtacttaatctagtcactagctttcctggagcaactccagaggaagtcggtaccataatcccgggatgaaggatataggatattaaaaggatgtaggacccatacgtacatcatgttctgaatcaggaggcctggggtctttgagccaatgctgtaagaatgttctgtctcaggagttaccaggtttctcccataagtaaagaagaggggataatgaaatgaagtccttagtatctgcttgtcttaccgaccctcatctctttctcctctggtcatttcttgtggtcattcttcctgtcccaggattgaagactcagagtgtcttcattaaagtcaacagtacggtgggcagtggggccaaatgtcctctatcaaatcaatgctgccttgattctggaggatgtgtaagacaggctcagatgtgcctgagaagcaccgaggcttctagccctgctgtgataggtgtggccgtgaagtcactgtgcagttgggtcttgcagctcagtgtcagttggtgactagctccagtatctatctgtgcctgttctttctggcctttgagactccagtcactggccaactagtcagagacctacttgaaggctgtagaacacagcaggctgaggagcatgcaagggcatcccaaactttgttctggttggcttataaaatgcaggcctgagtatttataatcattcttttgagttatttctcattcttttgagttatttcctaaataaccaaagggagatatatatatatatatatataaagatttatttatatgagtacactgttgctgtcttcaggcacttcagaagagggcatcgatcccattacagatggctgtgagccaccatgtggttgctgggaattgaactcaggaccttaactgctgagctatctctccagcccaaagggacgtatttttaagtcagcttaatgatttttttttatgtatgtaagaatgttagatgactctaacctaactttatttgtagaatagatgtcttatactgtattcaggatactaatgaaatggtttttatgataaatatcatctttgtcactttgtattctgatgaaattaatatggagtaacttataaataaaagaatatggcttattatgtaatatttacagagtatgatggcatatattttattgtgtcttttatattgacaatttacattttttggcgacgaaattccggcacaaacacaatgtaatttttagtcctttgcatagtaatgggaactgacatgtctcttttctcccccgccccctgcacctcctcctctttgtggtttgtttgaaagagggtctcacgatgtagcctaggctggcctctatctttgggcaatcctcttacctcatcatccttagtgctgctgtcacaggagtgaccgctgtgtccagcaaatattcatccctgtatcttcagaggcagtcagaggcatcatataggcttcagttccataaatcataaaaaataaaagcacttctactcaaggtggattataaaacatttcctgcttttgtttgtttgttttgttttgtctttgatgcaggatctgtgtagtcctagctggcttggaactcacgccacagaccaggctggcttcaaactcacagtgatccgcctgcctttgcctcccaagtgctgagattaaaggcgtgcacctccatacctggcttctgtactatattttataaaacaaaacaaaacaaaaacccctcacttttatgtcacagaacagatctgtgcccggctcatagaatatagtattactcctgtacctgtgtggaaatcagcatgagtgtaatttatctaagttttacactttatctttttctttgcagattgaattcctctcttaaacgtctggatttttttctttttcttttttttttttaaccagtggaaactttttctacctagtggtcaatggcttaatttgaacaagcgttgctgtggctttggttccgctgtgcttttggaagcttgggtctgaaggatacaggtctttttgtgatgacaatatgacccacagtaaaggaagacctgtcacttacaagacaagtgccagtccggagagtggaggaggttttgtagattggactttaaatttaaatacaattcaatctgacaagtttttgaacttacttttaagcatggtgccagtcatttaccagaaaaatcaggaagacaggcataaaaaagtaaatggcatctggcaggacgggctgtcgggtgcagcacagaccttcagcaagagatcagagccacatctggactaccacgagttctcagagcaagccttccacagcagcagcagtgggcacactccagccagctgcagccccaagtacgatgactatgctggctataactactgtgacgggagggaggcttcggaaaccaccgccatgttacaggacgaagatctgtccagcgagggcgatgatgttattgtggaaacaagccagaggattccaaaggagtccagtggggtcatggctctgcagatattggtgccattcttgctggctgggtttggaacggtttctgctggcatggttttggacatagtgcaggtgagattttgtctttagtttcactgtatgtgcaagcctgtgtgtgtgtgcacactcacgtgtgtgtgcatgcacgtgtgtgtgtgtgtgtgtgtgtgtgtgcgtgtgtgtatttgctcaattgtgcatgtgtgcatatgcatgcctaccttgggtatcttccttaattgcttccattgtgtttgtgagtcagggtctctctttcacttgaaactcactggctcggctggcaaccacttaagctctaggggcctgggctgcctctgcctttttagcttcaggattatgcatgtctcaccatgcttggttttctggtttggttaattaattaattaattaattaattagagacaggctctttccacacagcccttactatcctggagttcactatgtgtggaccaggctggccttgaatttacagagatgtgcctgcctctaactctgcctcctaagtgctggatttaaaggggtgtgccaccactcccaaaggctttcttttttttttttcttttaaacatagattctgaggactgagtgtaggtcctgaggcttcactaacagagccctcaccccatcttcctcgtctcctcctcctcccctctttccccttctcttctctttcctttggtctttcttcctcctttcctttcccttcttcctcttttcattttctccttctctcccgctccccttcagtagggtcacattgcctagctttcactggctttgaacttgtggtctttcctgccttaggccaccgagagctaggattacaggtgtgtgcccacatctggcttcacttcacttttggtttttttttttgtttgtttttcatttttcccatgctatgtcagttactaaagtctcctactgggacaacccccttttagttgcatttgtataaaatctgtctatgttattatgtatttacatgatcttttcagttcagaaagcaatttcgtatcattagctttatggtgtttgtccgagggccatttatctctaccttcatttaatagatggagacatccgagagatgtctcctctgggattacagagccagctgtgacaggtccatcctgaagggcacaaatgtcgtttcatcagagcatggtggcacatgcctgaaatccaagcacccggggatgctgaggcaggagcatcatgagtttgagatccacctgttctactatatagggaatttaggatagcctgagctacagtgtggccccctgccttaaataggattttcagtttggtgctggtcttatgaccctgttatgctactgtttagcttcataccttaaaatgagtagcagacatagggccactagctacttcagatgtcaactctcaattcctttctctcctcttctctcctctcctctcctctcctctcctctcctctcctctnnnnnnnnnnnnnnnnnnnnnnnnnnnnnnnnnnnnnnnnnnnnnnnnnnnnnnnnnnnnnnnnnnnnnnnnnnnnnnnnnnnnnnnnnnnnnnnnnnnnnnnnnnnnnnnnnnnnnnnnnnnnnnnnnnnnnnnnnnnnnnnnnnnccctcctcctcctcctcctctctctctctctctctctctctctctctctctctctctctctctccccccttttgaccttgggaatatacctgtgcctcttcagatctttatatccttatctgtaactgtaataacaacagagtaactttgtgtgtgtgtgtgtgtgtgagattgttgtaactagtgttagaacccagactccagtccagataaggaagtcccacagctgagttcttaaccattagggacacgaactctgccattatgaaatggtaaagaaactgggcgttgtggtgcctgcctggcatctagcatttggggtacagagacatgaagctcacatgcttaaggctagcctaggctaccttagtgagttaatggccagcctgagctgttttcaaaactcaagggctggtgtgcagctcagtggtagagcgtttgtctcacatgtgatagactgtggacttcatcttgaggacttccaaaaaaaaaaagtgtgagagagtaaattttaggaggaccaggacgtcaggctcgagttgtctaaagtcctcagaccctgatctcaggagggtgtggtgattcaagaacacattcactgatgagataacctgtgctgtgctttaaaaccgggaagcagcctgggtgctgtccccagcctttaatcctaggcacccaggaggccgaagcaggcagagctctgagtttgaggctagcctggtctacacagtgactttcaggccacctagggccacatggtgggacactgtctccatagcccatagtgccaagaacaaaaggaagggaagttgagaataaactccacctctctctttagaagggtcctgtgctgagggaagccattgctttgttttatagcactgggaggtgttcaaaaatgtgacagaagtcttcattttggtccccgcgcttcttggtcttaaaggaaacttggaaatgacgctggcttctcgattatctactgcagtaagtttgttttttcctatttcctattatgtgtgttacttatttctctccacatagaagagtttgtgtgacaagaaggttggtttcctgtctggtaagtttcccagcctcagagttacaccagatagctgtgactgacggtgccctggaagatcttggtattctctcaccagaggcgatggacctgcttctccttatcaccagaagccacagtacgtttgcctcctttgctgccaggctgcactagcaggtattattagtgtgtagtacttggggtgggcagatctgagagtgtttgggtctgaggtctgctgagttgaaagtagagtgagaatcctttgtattctcttttataatcgtacctatcatatatggctcatctgttcatatcagtggatccatatttatactgcattagctagtgctgttttatcagacagggtttcaaacttgctatgtagacaagactggccctgaacttggagatcctcctgcttctgactcctcgtgctgggattaaagacatgcaccaccctgcacatagctatctcctttgatattatagaaccccgtagtttgatttataactcattattggatgtttaacatgctataatggtctatcattatagagagtgttatgacaggagctggagagaggcggctcagaggtttagagcacttacttgcatgcaatcccaccacatagcagttcacaactgtccgtaactccagttccaggaaagcagatgttgtcttctggcctccaagcaccaagctcgttatatgcatgcatataggcaaacacttataaataaataaataatgttgaatatatatacatatataaatacattatatatttattatacataacatattgtaatatattatacacaatattatagatataaataatatataatatgtatattatagaaattataaataccataaatatatactattatatgtatacataaaatatataatatattataaacacatatttatatatgatatataatacataatatatagtatatattatagacacatttatataatatatatgtgtgtgttatatatgtatatgtgtgtatatatgtgtatgtgtgtatacataggtatttgtgtatacataggtatatatatatatacatacacacatatacacacatatatatacatatacatacatacacatatacatacacacacacgtgtattatatatatatatatatatatatatatatatatatatacatacatatatttgagataaggtgtcactctgtagccctggctggcctggaactcagtgtatagcttgaactggtctcaagctcacagagatgccctgtctctgcagtccatgtgctgagatcgaaggtgtgcaccatcatgcctgacttaacaattatgataagtgaatgacagtagaggcataacgcagacacagctctgaagtaagactgaggcagagccgaccaaccgttagatactgacttactgatctgtctagtggcttacttaaggcagtccatgtactgctctctaccaagcatgacctcacttgctccctgaaccagaatggcctgcagaggcacctgtttgcttctataaatcctggctgtgtgccaccatgctaagatgggttttcctcaacagttgtgctgggacgagaatacagtgaagactcatgacatatatttacatagtttaagattatctagacttagaaactttaaaaaatcatcctaaaatctgaaagcccacgcagggagtggtggcccatgcatttaaccccagcactggggaggcagaggcaggtggatttctctgagttcaaggccagcttggtctacagtgtgagttccaggacagttagggccactacacaaagaaactcagggaaccaaaaaagaaaagaaaagaaaaaaaaaaaaagcagcttcctgtattatatatttaaattcaaagtgtaagggtacctttttctcaagtgataatgtgatgtgataaatatgtttaaaactctcagaaaaataagagatggggctgggaagatagctcagtgggcaatgtggctgccatgcaggtgtgaggacctgtatatgatctgaggtagtgcgtgcgtgtgatcccagtcctggggcggcagaggcaggggaagccctgactctccctggccagccaatccagcctagtcggtcactcgaagaccagagagacaccttttctaaaaacccgagtggatgacgcctggggaatcacatcttagggtgtgccctggccgctaacgcatgtgcacacaatgtgcatgttcccctgcaaacacacaaactctgtgcatctaccctccaacacacacacacaatttcttgaaaaaaaaatctaattgtgaaatcttgatgtttaaaatttaaattttatacttattgattattccagtaccttcttattgaatgatgacatctactgttatgctgaatttggattttagttcttgatcatttggcatccagatgcaatgtgttgggtataaccccagccttaagaaggaaaaacaaaagcgtatgtggctttcctgtagttttgagagttagcggacagacacgaccatcacccacacctgagtccaggaggcaactaccaggagaaactgaggcagtggtggaagcgtttgaggaggagaacactactggatgggaatgaaaaggtggcttctgtgtcccttgttgcaaaatggactttgttctgataaatacagctaagcgtacaagtgtttaaacaacatgataccattgccaggaatagtgaaattttggttcagttacctcaaagaacattgttctcaatgcatctgtcgttcttgagcctcgtccagcgtttgcttagactcgtaatagattatgtcattctcttttgaaataggtcacactgtgggaactccagtttaaaaggactatattttaaataagacctgtcatctttaatccacatgttgacattaagtctcataaaggtgaatctaatcttttgggggacgtctatcgagacagcgtgctggctagcattatggtaactcaatataacctagaattagctgacaggagttatcgactgagaaaatacctccataagatccagctgtagggcatttttcttaattcgtgattgatgggggaaggcccagtccattgtgcacggtaccgtccctgggctggtggtcttgggttttataaggaagcaggctaggcaagccatggggaatagagccaataggcagcacccctccatggcctctgcaagagcaggccttcaagttcttgccctgtttgagttcccgtcctgactgtcttcaatgttatagaagtgaaagccaaataagccccttcttctccaagttgctttggttatggtgtttcatcacagcaacagaagctctaactgagacagtcagggtctcactgtatagccatggctaacttggaactcactctgtagaccaggctggcctggcacttgttgctgtcttctgcccctgcctcctgcatacagggattgcaggtgtgagaaatcacacctgactcagccttaataattttttaaaaactctgctctagtgtctgttttgtgttgagtatcttcctcatgggtctgtatagatcatgttttccattcatattttagagaggagagtttcaaaatggtttagaagcccagcactaggagaaaacccgtcaccggggttcctagttcagaacatctctttgggaggtaggactggagttactatcccctgtggactgagaactgtgcaaagaggtggggcttcttggaggtgggggcaggggcaagatccctatgaattcaaggtcatcctggtctacccagtgaattcccaacaaggtgggatcctgggggaggggcaacagagggatggagagaatgagaatggattgtgtccgtactgataatcatatactgctaacgtaaatgagataaagcaaggatctgaggctgagatagggacattccagacaatgaagggtggaggctagagtgtgtgtggtttatatgctaggtggatactccttccttacagctgtatgtgtggaggtgcctttgccagccagccagggtgcctcatttgcctgatgtaggtatgggaactgaattcaggttctctgttctggatttttgaaacaggtttctctgtgtagacctggctgtcctgcaactctctgtaaatcaggcaatccttgaactcggagctccccctgcctctgcctcccaagtgctgggattaaagtcgtgtgtcaccactgcctgttgagctaagatgggtgtttcttaaagtgtggtcttttaatgtcagcaccagcagcctgttagaaatggaaatatttggaatcattccaggactactgaaccaacatacaaccagtaatctgttttaaaataaaccctctagggactggagagacggctcagcaggtccaagcacttgctgctctcgcagagcatctgcgttgagttcccagcacccacctggtgatttacaactgtctgtaattccaggttcagaggactatgccgcccccttctgacttctttgagcactgcgcctatgtggaggatatacgtacgtgcaagtaaaacacttgtgcgaaataagattaacctaaaacaattacataagctctccaaaggtttgtacagtgtacatgaaggtttgagaggccatagggttggagtcaggtgagagtggtgaaatgcaaaagatgaaggtggagagctagccaggggccagcgggcagaaggctgtgcggtctattgtaaggtctttggctgcttgtgaggtagggccccttggaaggctttgagcacaggcgtgatgtgagcttatagacatctttaacagactgtcgtgttgttggggcgaagagaccagtctgtcactgtgacctagggaaaagatggtgctgatttggattgttagtagatgtggtgaagttgatgggatctaggaggtgccagagaatgacagaattgagtgatgagttacagagacgggacggtagactcctccaagattggaggtaaaagctagttaccaggaaagggtaaaaggacaggcaggttggtaggtggcactgagctgtagtgcatggtctttacccagaggagtggactcaagtgtgcgaggctgagtgtgtgcgtccttaggtcgttggcagtaatgcagtttcaggttagtggcttcttcttcttctctttttaaaagatttatttattatatgtgagtacactgtagctgtcttcagacactccagaagagggtgtcagatttcatgacagatggttgtgagccaccatgtggttgctgggatttgaactcaggaccttcagaagaacagtcagtgctcttaacctctgagccatctctctagcccaagttagtggcttcttaggaacttccagaaccccaccttttctaggcaccctaccacgctctccattcgcctactcactcacagacattgctttgcctcctccttgtttttatttcttcttatttgctctttttcataattagaaggtttaagaatatataatcaatgtattattacatatctcctccttcctttttcttccttcttccctcccacatctgccccattcatgccttctcccagattcacgcacggcctcctcttccctaaccattgtcgttacacatacagaaacacaacgtactgaatcccttcagtgctgcctggatgtgcgtgctctagggctgaccactcggtactgcaggaccagccaagagactcagccctgggaaagactcactgttcctctctcagcagttatctgcctgtgtctcttcatctaggagtgaggcccacaagacctgccccatccacactgggatggcagctgccattagatttgttctggtcttatttgggcagccaggttgttgagatctcaggggtgtcatggcttgaagacacagtttcacagcagacaccttggtcccttggttcttgtaaccttttcacctcctcttctttgatggtccctgagcccttagtgtagctactctctgcattttgaacagtggtattttcctttactggtctctgctgccaaattgtcttctttttatttatgtgcacgtatgcctatgtaccatgagtgtgtctggtaaggcagagaccagaagaattccctggaactgcaaatgcagacagctgtgagctaccatgtaggtgctgggaactgaacccttgtcctctggaagagcaaccatactcttttatccatcccaggataaaagaatcttttttgacgagggctgaggcctacctaccagaagggtaccatttcgagtgcagttaggaattaaccttgcttaggaaagtaccagcagtagattcttctctaagatctctgacctcatcaactgtgttgttcgtgagcttgtggtaatgcgagggtggaaaagtgaagggtgtggggggggggtggacaggatgattggagaaacagtgtaagcattggggcaggaaaagagagccgtgtaaccttggcaagggaatgtctccatgcccgctatttctgtctgtcttccagaataattcatgtccccccacccattcactagtgccctcccaacattaagtaattcccgtcatgcagtaacctgaatgtttgtatggacaggaactgtggaatgtagttccctgcctacaggaagaggttggcagtgatggtaccaagtgtatctggcctgaatccctaagtcagtatctcatactatgctgtgccagcctcggtctccgtggaccctggtgcatgtgagcctctgctgcatattaacagctgaggaggtcttctggctcagacttctgttggagtcattgcagattgttaactatagctattgacatctttctaatagttactgaaatggcagcactaacctctgcctgcctccggagctctaaatccacgctagattcactccttaatcattgctcgatcgagtggagctccagattgctcgagctacaaacacgattgaatcaatagttattgtccggtttagtaaatgcgactataaagacagcacgcataattgttgtaaagcaccgagaaacctcggtatttgcattagctggatactttgagcctcaagtccagagggaggttgcagagtagaatatgttttctaaattgaatagatggcatcttgatgtgacgcttaatccactgccctgccgccactgagacagctccagttcagccgtgggtaaatcttcctgtaaacgacaacgtcatgtgtttccgtggcactggagattgagccagggcctagtgtgctgtatctcctttacttgaccttgtgaaacattttttaaaaagccttaaaatatgtattgagtgtatgtatgtatgtggatgcgtgagcacgcacataccgtgtgtgggtgtgaggtcaggacagcttgccagagctgttcccttctccattgtgtgacttccaggaatcaaactcaggttgccagacttgaacagtgagcgccttcaccgctgagccgtattgcaggccgcagatgtttttataacagttgaaaatctcccatgagaagatgaagaataaacaaagtctaactccatgtactagatttataaatttcatgcatgtgtgtattgctagtgtttgtccattgctttccaaattacgatgttagaaaaacttggcacatttggatgatttttattttttaatccaagttgttgagaaagaaaattatctgtattgcagagcagaagagtatgtgaatcctaatcttattttggaaagtgtccctccatttatcagaaagctgtatgtatattttgataattggaggtatgcagtggagtctgtgaacctactgagctcttactgctaagagtcacactcatgactcaaacgtgaatgatttgtttatattctactctctggcagtaactctttggttatgttaattttatgccatggaattatgtgccaacagctcacaactctctttctttctttctttctttctttctttctttctttctttctttctttctttctttctccctctctctctctctctcccttccttccttccttccttccttccttccttccttccttcctccctctctttctttctctctctctctctttctttctttctttctttctttctttctttctttctttctttctttccttcgcacattttttaattagatattttctttatatacatttcaaatttcaaatgctatcctgaaagttccctataccctcccctgccctgctcccctacccacccactcccacttcttggctctggtgttcccctgtactagggcatataaagtttgcaataccaaggggcctctcttcccagtgatggccgactaggccatcttctgctacatatgcagctagagatatgagctctgggggtactggttagttcatattgttccacctataaggttgcagaccacttcagctccttgggtgctttctctagcttctccattgggggccctatgttccatccaatagctgactgtgagcatctacttctgtatttgccaggcactggcatagcctcatacgagacagctagaacagggtcccttcatcaaaatcttgctggcatatgcaatagtctctgggtttgtctaccactctttctattgggccttagtatagcaaacttggtgtgaggatgacaggtggcactgtcctccagcaggtggatgactaacttgtcacctaagaccctattttcccatcttgaccaagccggatgtcacgcagcaggccgatggtgagctgggacttgttctgagcacaggctgcacacagcagaattattacgagaggtgtattgtgtactttgggttctgtttaaatgaagcagacagcagagcggatcataaaagtatcctcttcgcaggtaaatgttgggaagatggactcacccattgagaagtggaatctaatcattggcaacttggctttaaagcaggtaagtggtgggtgcttagtcacagagctcggatgtgaagcctaccattcaagacatcagattctaactcagtaaccccaaaagctaatggaatcaattgattgatacccagggcctttgaaagttattttatttctagaaactgattattttcttccaaatgtaaaaaaagtatacaaatactgaaagacatggaaaaaccctctaactgcaatagagctaacctttgtactgatacttatacaactatttaagactttgttgtttaattacttactttgccttaattactgttccgttgctatgaaaagacaccatgaccaacccttttaacagaacgtgtttaactgggggcccgcttacagtttagagtctggtatggctggaagcagacaggcatggtgcatgagcagtagctgagagcgttatatcctgatcagcagcatgcagtgacagacagacatacagacagatagagagaaagagagagaaagagagagagaggaggacagacatacacacacaaacacagaggtgggggaagggagagagagaaacagacagagacatacagagagagacaagagacagagagagacagagactcagagcctgggcctggtaagggcttttgaaacttcaaagtcctctcccagtgacacacaccttccaataagccccctctccccttcctaatccttcccaaacagttccactcacaggtgtctaagcattcaaatacatgagcctgcagtgtgtgtgtgtgtgtgtgtgtgtgtgtgtgtggatactcacttaagtctctgcatgtgctatttctctgctttcatttacggctctacttttctattatgactgtaatggggaggcctagacaggatctcatgtagccttaaactttgtatgtaagtgagggtgaccttgaacttctgatcccactctcctcctcagtgcaaggaccacagatgtgcaccagcagttgtggtttatatggggactgggataacccattgctttgtgcatgtcagccgagcactctttcagttgacccacatctctcgccccgtctttatgagttttggggcatccttttagtgttgctcaggatggccttacagtcagacagaatccccctgcctcagcctctcaggcacactcaccaggccctgctctttgtgttttgtttgtttgtattagttgtagaagtttttgcttttttgaggtgatacctgtgtttcctggtctgatctcaaactcctgtgttcagatgaatcttcctgggtctacaggagccaataacaagactactttaattcttctaaattagtattagaaataagaaattagcattaatttctccaagaaattaaattagaaagtctaagtaagtattagttgcttaattaaagtgagctctttcctgggactgtgctcattcatctattaatgctgatttttctacctcactgttaccattaatattaataaactcactcgaataccaatagcatatgtcctaacccaggaattacatatcatcccaggaaatatatatatatatatatgtatatatacatacatatatatacatatatatatacacacatatacatatatatatacacacacacacacacacacacacacacacacacacacacacacacacatatattactcttactagtctcaggtgtctcttctgcctctttatctattcttccctaactttttaagtcagagatttcacctgccatgagtaactctttagctagtttgagcaccaggaatatacactcattttagtgttagctcagctaggccccaagattgagaacctggttgtgggaatataatttggtgcattgcatctcagggacaaagagttcctgggaataaaagctgagccataacctcaactctaatgtcacccagatgaagagcctttgttaattcatataatctttctgggcttcattttgtctcttcagccatagtattttcttagaaaattctaagaacatttcagctggaccttgtagaaatctaagcaggggtgggaaaaacatttaagaacagggatgtacatcagagggagactgcttgcctagcgtacaaaatgttccctgtaacaatagcaaaacaaaaccaagaccttctaaatatttatagataaagagagcactataacaagttaaaaagttgagaatatatggatttaagcactgaacagtcttaagctgtgaacatgaacctgtcctgggcgatctacacaggtcattgcaaaagtccccatgccagcctctggcagtccctcccttgccactctttcctgtaactgggttaggatggttgccagagatggctaggaatttgctgactctggttgccaacatgtttggtttactcccccatggacacgtgatgaacaggaaacagcagatgccctctaggtcagagcggttaccactgagaaagggaagaagagaaaatgggggctgagggctgaactaggggaagttatcttctccctgaagcgcaccagggacacttgtgaggagctggacatagagtacttgaggacaggcttggaggggctggagagatggctcagcaggtgagaccactctctgctccctatgagtgctggagtttggtgctcagcacccacatcaggaggtacatctgtgagagtttgagttcagctctgtctacatggtgagttccagaccatccaggacaacacagagagactctgtctcaaaaacaaaacaaaaagaagtgacccctcactccacacctgttgacacagatcagggcatttggagagcccactgtcttaagtggtaataaaactaaaacccaggagccccttcaaagtgaaagcagttcagtaaaccatacccagcaccctaatgatcttgtatgtaatgattaactaatgatagtttaatgttttaaaaattactaatctggatttcacaaaaatgtttttaggttcaggccacagtggttggctttttagcagctgtggcagccatcatactgggctggattccagaagggaagtattacctcagccattccatacttctgtgctccagcagtgtggcaacggccttcatcgcatctctactgcagggtaaggggatctgtgaaggtcgacttggcagttcttgacatttcaataaaaggattgatttcccaggatggcaacttttaaaatatttgttcataatgaaaatggtagcaaatttccacataaactttaaagagccttagttcaaatttatttctctgtctcatctacctatctacctatccatccatccatctatccatccatccatccatctacttgagttctttgtatacagccctagctgtgctggaccaggctggcctcaaactcacagaggtctaccaccttctgcctcctgagtactgggattaaaggcgtgcaccaccacctgattaattttatttgtttcattatttacagacacagtggaggacaggctttttgagctcggccccttggccataggtagatgttctggctcagttttcagtaagaatactatactttaagagttaagaaatgctttcctggaagtcacacaggggactttctggcttgtcacaagcattccagggattcttagtttcaaaagcaatccctcatttaaatttttggttgagggtacttccatgctgctagaggaccttagttcagttcccagaacctaaatgaggcagctcacaattgcctgtgactacagcccacggtgaaggatggatccaacaccatgatcgtcagagggcatctgcactcacgtgtgtactcggccactcagccacacaagtatacacataaaaaacaaaaaataaactaaaaacccaaagtttacatttctgtggcactataaacataaccttgtacttatgcttaaggtagcatattttgggttatatatttaaaaaacagaacttaaaagaattaactgannnnnnnnnnnnnnnnnnnnnnnnnnnnnnnnnnnnnnnnnnnnnnnnnnnnnnnnnnnnnnnnnnnnnnnnnnnnnnnnnnnnnnnnnnnnnnnnnnnnnnnnnnnnnnnnnnnnnnnnnctgggtggtggtggcacatgcctttgatcctagcgcttggcagtcagaaaggggtggatctctgagtttgagggcagcctgatctacaaatcgagttccaggacagccagggcttcacagagaaaccctgtctcaaataccacatcccccaaataaacattaactgcattagaatttataggattatcttctttgtatttattgatatgagcactatattaggctccatgtacgttacagaatataatcactgaagcttagtttttactacatttttttgttagttgtgggtttgttttgttttggtttggtttggtttggtttttgagacaggaatctctctatgtagccctggttgtcctggaactctctatgtagaccaggatggcctcaaactcacaaagatgcccctacctctgcctcccagttgtttgtgatcaaaggcatgacccatgcctggatagatcttgctgcattaaaataataataataacaatagtacctctttctgactttgtttcatttagaaagtgctacttaaaatttttcaatatatcaagtgtgaaatatctacagttttcaaagctcaattttttaagtgaatttttatgttcctcactttatctggctttattcactttatatggctgcttgatatcttagccattttaatatgtgtaaagtgggtactgtaaacttctcttcctaggtgaggaagcttcacccccttatcagcagtacagtcaaattacagctcggttctccgactcccagctgtccactgggctgtgtgtgcggtttccaggatgaacatggtatagcccagaagcatctgcatgtagggctctaaaggtgctgatctggagaaaggtttctgtaggatcttggacggctatgcaaacattttccttcccttttcaaatgcactatggaaagaggagctctgatgatgaaaacctcctggtatataagatgtgagcatcaattggtacaagacacaaattctgctgcttgcaggtttggctttatgagctagggtgctgggtagtggagcagaatcgtaaactgtgtggcctctggcaagattttaagccctattccctagacgttgggcttattacccataaagctagcatgccagaataaaatgtttacagccaagggtactctgaaggtgtgagatgctgttaatcccttcccacaatgcttctgcttcagactgatatacggtaccgtgcgagctacacacttcccatttctttgtatgatgttctttccttttgcttcttttcttatactcttggttatggacataagtgttacacttctttttttttttttttcatttgtatgattcaagaaaataaggatctgacagtgtaagcactcagtcacatttcatctgtcactgctgagagacaggaacttgagccagagagtactttgtaagctgggtatggtacttgacgccttcaatcccagcaccaagagggagaggcatgcagttctttgtgagttcaaggtcagcctggtcgacatagcaagtcccaggacatgtaaaagctacatagtgagtgagatcctgtctcaaaaaagaaaaacagtatcttttaaactttttgtttatttgtttttgtttataaggtcttgtcaaatgtcctcagctagcctggaactggctggccttgaagtcagataatcactggcttctgcctttccctcccaaattcttgcattaaagacatataccagcaccccttcttctttatttagttttaaaaaaagatttaattattcttactttatgagtatgaatgctttgcctacatgtgtgtgtgtgtgtgtgtgtgtgtgtgtgtgtgcgcaatatgtccaggccaggtgcccttgaagaccaaaagaaggtgtagccccagaaacttgagttacatattgttgtaagtcagcacatgggtactggaaaccagactcaggtcttctgcaagagcagtcagtgcacttaatgactgaaccgtctctccagccccaaagactattactttttaaacaaacaaacaaacaaacaaacaaacaaacatattcttgccattttcccttaaaaaaaaaagatttatgtatatgacactgttgctgtcctcagacacatcagaagagggcatcagatcccattgcagatggttgtgaggcaccatgtggttgacaggatttgaactcaggacctgtggaagaatagtcagtgctcttaaccactgggccatttctccatccctaccactcccccttcttttcattctcccttttggtttttattgtatttactgtatatgagtccatattttgcttgtacatatgcctgtgcaacagagtgtcaggtggatgcagagaatcttataggtcccctgtaagaacaagtgctctaactcactgaccaaattatctcccaagagtgtcttgtatcctctgttctgaaccctagagttcaaattgtaattatgtcttgcttccttatactttgttttggaaaataagaagaagcaattttagttaccatatatggcatttttttttactatgcacagaaataggactattctctttttaacattttcacacttcaagggttaaaattaaaatctttggtttgatatatatatatatatatatatatatatatatatatatacacactcacatatatatgtatatatgtatgtatgtattacatttaaagcatatacctcattaaatcagaaattcaagttttaattttacagtcaatgcaacattgaatcagtatgtcctgtgatcttttatagtttgtggaagggcattttgccttagtggttacagtaaaatgttttgtttcctcagtcagtttgttcgaacattctaactgaaaccaatgtgctgtttatccatgctgtgtatttcagcatttggggaatggattttttccaagtcagcttcaaaagtaacaagtgttctttctcctaggaataataatggttggtgttatcgttggctccaagaagactggcataaaccctgacaacgtggccacacccattgctgctagttttggtgatctgataactctcgccatattagcttggataagtcagggtttgtactcctgtcttggtaagttccctgaaactgaacatggcattattcagagtctttaagagaaatgtaaagtgtcatgaatccatagtgaccttcaactgttagaactaggggtaaaattgatttcaaacactgtagcctgtatgtttattatgtgctgtggttctcatgtatgttttttctcttactgagttcagaactctgaggtaatgtttattttctgtaatttttttcctttctgccccatcccctgcttttctttcttgaggcagcctctgtcatgcagcctcagacaaggcttgccttcaaactccacctcccaagtatttggttgctacacctaggtatccttggtaacttcattgagaaaacagaggatcatgggagttatatatgctacccagcattattcaagcctgtcatactccataatctctgtgctttcttctagttggatagccagttaggggttaccctctgctgttttgttattctgtggtgtgtgtgtgtgtgtgtgtgtgtgtgtgtgtgtgtgtgagagagagagagagagagagagagagagagagattgtgtgtagggtgtgtgtgagagagagagagattgtgtgtagggtgtgtgtgtgtgtgtgagagagagagagagattgtgtgtagggtgtgtgtgtgtgtgagagagagagagatttgtgtagggtgagagagagagagagagagagagagagagagagagagattgtgtgtggtgtatgtgtgtgtacgattgtgtgttttaatttaccataatttaccaatggttatttttccactggagaagggagcttgtctaggcaggcatggtggcacacacttgtaatcctagcacttgggtatttgaggcaggagcattgtgattctgagaccagaatgtgagaccctgacatcagaaggaagctgtaagagcctaaacagggtgctcagtgccctttgactaatgttgaaggtagagaagtttctcctgctttgaggagccctaagagaaaagcaatacacaagaggatgaagggtttctcccaacaccattaagaggatatacttgcctgccacagattaactgggcatgatactacaagtctgtaatctcagcacccacacagcggctcacaaataactgtaactccagttgaatctgatgatgaactggtggcctcttctggcctccttgtgtatcaggcacacaggtggtatacacacatacttgcagttaaagcacccatgcagattaaataaatgaatgacatcaccataattgataggttatttctctgccagtgaaaagagccagttcaagatagattagattagattaaattcaggtttattgggaagctgctctcaggtgaattcactggccccaaggagcaagtcaccatggattgggggacagagagaaagggcagagagaggagaagcaggaggtgagtaaggaggaagaggaggagaggaaaaggaggagaagaaggagggagaggaagaagaggaggaggaggaggggaacggtgaaaccaacatacatggattatattgggaagagcctctgggagaagggcaatccagcccctggactggaaagttcagggttggggactgggtgtatcaggtagggatgagggatgctgggagaacctgaaggctaggtccgctttgatgtgtaaaatatgcacctcagtcccttgtcctggagtccaaaaccaaacaataacgcatcattgtttaaagctttcactattttgagtgttctgtggtgccacagtaagatggggtcttggtagggcctcactgtgtatctgaggctgcctctcagactcatccttcatcagctttctgtgcactggcatcatggctgggaaccagtacatctgacattactttgtttgctttgaggagttgaggcttgaacccaacaccttggacggtgatgcagcgatgcttggtgtgagtgaggagtgagagcaagtgcagtgttccataatcttagacaccaatgctgctaaatgtcgtttaagatattccaagcctttatttgcctcctgaaagttggcttaccttcattcaatttgcagtgttccggatccttttcatttcatctgtgtaattgatgcccccgagggatttcctttttaaatgggctaccggttaattccacaattaatttaacagtttacaggtgttctgaaacgtcgtttgcgtttgggttgccaaagcagctgcatcctgagcactagggggcctcagaagctcagtattttcattctgaatacagagattagacgtagacacatttaatttttaagatcccattcatcttgttgagaagtcaggtcctcgaaagcaaaatttaatttctgaactactctggaagcactgagcaatgcttagggaggaaaggagggtctttttggtagctgtaagttctggctttagagactccatactctacggctcagaggctaccaactatgctgctcgaaaacgggacacaggaaaagtttcccggatcaattcacaaagaggctgcaacagttgtaaatgtatgtacccagtgtcagtgctgcaaaatatgtaaaagttaataactggctggaagggaaggggaggaacaatacaagaacagtgggggctccagcacccaagtcatccggatggaggcccagtgaagaaacgctggacttgacctgcacgctggtccacaggagcctgatagtctacagagtgttccagtcaacagctgcatgaggtgtttttttcttgtgggagtagagcactttctagagtacaccccatgtctagctaggagacaaaagctaacacatttaggaagcagacatcatgtcctgccttgggtcaccgtgatggtgtgagactggaaagtggaagggagacaactgtatgtaggtcagttatcccagtcagtgggtcagagatctcaacgtggaaacatcgtaagacagatgagcctggagacaggctccataacgccctggatggagcacgggcaggcccagggaggaagatagttataaacacctgtattaacgaaaatggcaggcagctgactgccacacagcagggaactgacaaagagcaaactgagcccaaggttaagaggaggagtaaagtaaggaaccaagtaggatagctgcagaacaaatcagcaaaatgagggcttggtttttcttgaagaaaatcgacaaaaccgcagctagactaagaagagaaaagacttgacgtcagaccagaaaagcaagcaccggcatcgtaatgggtgctgtagaatggagaggaccacagggattatgtgccgaaaactcagactccggggatgggtgcatctctgtaagcatgtacccacagagacctgactagacacgcagcaaatatactggaatagtaattaaagagaaaagaggattaccacaagtgtggagccagtctgggctccagagtgagaccctgcctcaacaactcaggttaagtacacacaaatgcacattaaacaattaataccccagacaacaaaagcttccgtgaagcgttccgagagaactggcccaggcctgtcttacgaggtcggcctctcagcctgctatcaaagccagacaccctgaggaagctatggaccagtggcactgatgggcagagctgatgcactctcagtaaaataagagcaagcagagttaaaaccatgaagcatcgcctatgtgatggtgctgggaaagagcatccattccttccacgcccgctcggcatcaaactggtagtacacacaagtagatggaaaaagggatgaaaggcatccaaactgaagagcaagagctagttactgctgtctgtaggtgacatgctcctgtgtctgttaaaagaagaagaaaaaaaccaacaacaacaaaaccctgaagatttcaccagttagttttagaactaatagatgggtaaaggtttcagaacgtgaaccagtacacaaaactcagttttattcctttatgccagtaaaggcttacctgagctagaggtggtgttgtgtgtctgtaacttggagagagctgaggcaggaggatcgtgagtttgaatccagtacatggcaagctgtagggcatccttgcttcataatgagagtctgtcaaaaaacccacccgcccacccatttagatgtccgtccgagcttacccacttagtcatggcacgttgttgaggctccattcatgactttctgtgtgtttggtcagtgattatagggattattttgtctaaatactcactttcctctccctcttttttaaaactgatttagttcactgcaggaagtcagtgggctgggcaataactagagtactgcctgtggctatatctttgtgtttgaaaacacaaacttctagatactgtgggcttttaaattttttaactttaatttctttgtagtccccttggtgccgtatacatattagatgttgaataaatactgttttacacagtacattattcctttggaaaatgatttcgttcatatgatcagaatttatttgagtggccctctaaggattttggcatggtggctgtccagtgatatgattggctgtaacaaagcaccctttgcaggaggtgtactcaggattagaggaactgtgtcaggcatcttgcctcagtaaagagcactggagagcaacatcactccagaaaagtagaaatggcaggaactggattccaggtctagttcgggtggatagagaagaggagctgttgtagtgtgagctctggttcatatgaataaggcgctctttactggggaagtgcaaaggcttgtacccattcacagggcactagttacatgtacaataatcttggaagctatcagaatctatcaccgagccagcaactgaagtaacaacacagctgttgctgctgtttccactttcttgtttccggatttctttccaaagcagagttggagcttatcaagggaacgttttcacgtagacctatgctttggcatcaggggagagcagggagcagaaggacagtatgcacctaagacgcgggtgcgggctgctccagagagtcatgctcaagtgtcttttgcagtggccccatgtaggactttgacttctacagtttaaagggtttctgaggaactccgtccgtgttcttttagtaaatgggacaatcaggggaggtgcattcctgaggtgcgtgggagtggatggctaagttctaactgaaggacattgatgatggtgtgtgtgaggctctcgagtctacatctgggaaaggcgtggggttccacctacaggtcgtaacattcactctggccttagcttgactctctgccatttcatcatccatgtttgaaacatccctgtaaaagggaatatcgtctctgtctctgtgcagccagtcttcacggcaaagtatttattgtgctggaattcctgactctgagctggaaaactcttagccagactcaggggggagaggttcctttcccttccacgccctcttgatttgtctctgcttttctattgtgcctcagtttctccttctgggaccttagttccttagtcttaagggttttctgaggccgaactctgtttttgtaacctctgcacatcaaagaaggatggagagtcagggactgaacgttgtgatgtccgtggtctaagggaagcctgggatggtcccagcatggggctgagaggaacctcacctagatgggaagcgaggatgtagactcaggatctcacatcgcagaaacagtaatcatgcagccatggaattggttgtctgaccctaaaattagcaccaaaatatgattaaaaaaattatcacacatctgggaactctgatgtaaatcattaaaactcaagacaatcttgacatcaagttaaataggactgaggacagttgccccagcttcaggtgagtttacagaactctgccctttcctccatctgtttgttggtggtgtagggaaagtgggtgttgtgttccatggtatgtgtctggaggtcattggacgactgtgggcttcggttcttctgtcacgcagattctcgggatgaactcaggtcatgctttggcaagcttacttggtgaaccatcacccagcccatgttctcctctttaatggtggcaaaggttctttctcctactgtgccagcctatcaggggcagggctggtgtatttcagtaggatgactcagttaacttcttgtgattggtttgaacacacaaatcataaattccaagttaccagcaatgcattggtgtctcattaaggaaaaatcagttgggcaccagtggcgcacgcctttaatcccagcactcaggaagcagaggcaggcagatctcttgagtttgaggccagcctggtctacagagccagagttccaggacagacctatacagagaaaccctgtctcaaaaaaacaaaagaaaaaagaaaaaaaaatcacacacacacacacacacacacacacacacacacacacacacacacgccatcccttggtgtcattttactaagagtaagggctggattaaattctctgcttcactctccctgtctcttttgtccttgtatgagtctggggatgttcctgctgaaactgtcttaggaatgtctgttctgagtatgtctgtccctgtgtgtgccttgtcttaggggttctattgcttcgacaaaacaccatgaccaaaaagcaaattaaggaggaaagcgtgtatttggcttaatctttcagatcactgttcatcatcgaaggaagtcagtgtaggaacctggaagaaaggagctgacttggaggccatggagggatgctttttactgtctcgcttcccttggcttgctcagcctgttttcttatagaactcaggaccaccagcccagggatggctccacccacattgggctgggccctcccccatcaatccttaagaaaaggccttagagacttgcctacactccatcttacagaggcatttttctcaattgaggttccctccttttagatggctccagctgtgtcaagttgacataaagctagccatcagaaaaggactgtattctctctcttgttgaacagaaagttgttcaatgggaaagggatgaagggtacgttgtagaaatctttaatagacgttacaagggatgaagtgactgacttcacctgattcacacgagggtacaattcaacgcttatggtggatatttattttataagactgcttgttttcataactcatgtgcattagtttttagttgggcatagaagaatacataatttaatattacagttatgcattagcttgggtgattacatgggaaatccaaggcaaggaaggttgattgttgcatcattttaaagaaaaggcaggttgaacaggctgagcacacagtagagcagcactcttaagtctcaggtggacttcagagtatattaacaaccctggccataaggcccagcaaaaaaatccaatctcttagaatgtaagttatttgataatattgcattgccacaccttctggccttaagagtaagacctcttgggctgtaaaaaaaagaatgtaccaaaaatgatatcaaatagcctggtagaatatgagagagccattcccagaggggatccagtggtgggatgtgtccagtggaaacaatcagttgtagtgactgagtgtgcgttaaaccaactgcaagggaaagacagcaatgcacatcaaagcatggaacgggctctggctggcaacagatgcctaaatgggacgtgcctttgtaagggaggttgtggttctctcatctgaagagaacgtttacatcttttcgcagttccctggtgtaaacatctttgtcttcaggatgctcttggggctgaacgactcagggaaaagttttattccagaggataaggccgtgataacattttgagttctggggtggagtaaggtctatctaccctaaagcaagtaccagatcatcggaatgaggtctcattatcattctgggcatggtggcgcaagtctttaactccagcactagggaagcagaggcaggtggatctctgtgagttcaaggccagcctggtctacagagtgaattctagaccagccgggaaatacacagggagaccctatcttcaaaacagcacaaaacaaaaaccagagatttaattttcggtttctcacggggcacacatctttctttagtagtgggttaagccaggnnnnnnnnnnnnnnnnnnnntatggctctatgtcctggcttattatagattattacagatgagaacacacaggctgctaccatgtgggcgtgtggactttattgtttctgtttaccaaaagacacaggtgagcagagcagttggtgctcttgtccctgggtgagctgagacagcaggctcttcagcagtgttctgctgatccgtggggacatttctgcagtgtcacctgccagcattgctatagctgttgtaacttttatcctccttggacatccatgtggtatatacactatatggtatatacactatatggtatatatgctaggttcagacgtaaacaaagggttggggaatgtctccttgattttaggtaaggactttcagcagcaggttttattgttgagctttgaacagacttttcaaggctacagttgacagtaactgatcctttatctttttttaaaaaagattttttttttaatttatatgagtacactgcagctgtcttcagacacactagaagaatacattggatcctattacagatggttgtgagccaccatgtggttgctgggaattgaactcaggacctctggaagagcagtcagtgctcttaacctctgagccatctctacagccccagagcctttatcttttagatattcctggttacgtcagaagttaatttaaaaggaggctaaatgagacagaaacaaagtcttcttatcgaaagagagcaaacacttattgtcttgaaaaaaaactacagcttttttctttttaggcaagatttcagaagcaaaatcagattagtttttatccttcaggttacttcgggaagctaagctctgtgacagctgtcggctccaggtatttcagtctcttgagaacagtgaggtgccccctagctgttgtgtgtgctagagtctcactgcctgactggatgttgactaatgtctaatgttgacatgaagagcctgcacttaccctgactgccattgtgctctgttccagtgatttatttaaagcggtgtgccacctgtgagtgatcttcataacgtcagctctcaaggaagtgtgatggttattaacgggcttttggagaagagtgtatggtgtgtgctactgtgttggtcacacagaaatagtggtatataaaatttgccaccatatagttagaagactttagatgatggcgagtgccgttcaggaagagaggtaggagtagctggaaatgctgccacggttacactgggaccacacaagggtggttgtgcttggcagttcagcagaatcagtaatttgcacaacttcagcttggtgagtctctactttcccaaagtttatttcagcacaggataagaactgcacatgtgagctctggcaggtataaaaaccccaatgcttcatgtgatcctgttttcagttgtggaaccaatgtgccacgttggcaaaaacttggtggcttgagacaatgtcttttcttagttttagaggttaagcatccaaaaggggtcagggaggacagataccaaggtgttggcagtgccggatgcctccagaagctcggggagagcatgtcccctgctctttccgcctggcactcactgtttgcagagcttgcttctgtacacacactgctctttcctctgttgctgcatcttgccctggctctctcttacaaggttgccagtgttcacacacactcaaatcatccacgcagccttgttgagacaaaatatatctgataacattcacagttttaagggatctctgtgggtcaatatacagcttaccacaatatgatgtattgatgttttaatacaaaatattattctaacaggattgactaaatatatttcatttagaaaagggacattaccttatactttaatatgatacagatgttgggtttagcttttaattgatcattttgttttgctaattatgtcattagtggttttctaaaagtaaatctttaattttatgacatcaattaaactccagattgaaacagaacatggttatagtaagtcatttgtaagttttggtttcaagatgagtttcccatttttttaatgcttggtgatacctgtgtactttcagaaaagctacaaacaaaagagccgtataagcccacgtccgcaccctcagcctcacccagcactgacactgggtcctgtgtttctcctttcctcttgttttccttttcgattaaagcccctaaaagccagcatgcagtcttccctcctgtgtgaacagctcagtggaggtttcataagatctgtcttcaccctgttccagttccaggaagtctccccacctctggagagcctggtttatggttctgccacacgctgctcttccctggctcccggcagctgctaatctctgtctgttggatttgcttcgtttggacgtttcatgcaaatgagatcataatgttcaacctttggtgcctggcttcttccatttagcatggtgttttcaggctttgcctgtattttcagaggagccaggatccaatcttcattgctgtagaacatcccagtatagaatgctaacatgtcggggtaacagtctcttggatggacatactgccctttcttcactagccactcggtaaacggtaaaagcctcggtcatttccacttttgcgcttctgccggataacgctgcagtgagcgttcacgagcttttatgtgacaatgcctgttttcagctctcttgggagacagcatttgggattcagctctcttttatgtggatacagcatttgggtcatgtggtaacttggtttaacgtttgtggatccacatgggtactcattatttttaatgttttcctccttcagaacagggcagcagtgagtgatgggggagtgcctttctcagcttcctaatccctcctgatatttaggatgaggataaagtggttaaagcctgcagttgagcttccgtctggacctgaccatgccgaggcgctctaccctggcaggagagttcctttcttttgtgcttagtgctttggaggcttttagcttctccttggtgccatggagattgttggcagctgtaggtgttttgtgagttaggaatgtttccaatgggtttacaataaattcatggtttttcatctttaaaaaaagcaatagaggggactagtgagatgacttagcaggtaaggccctgctgccaagcctgtgaggtggctcagcaggtaaggctgtgtgtgtgtgtgtgtgtgtgtgtgtgtgtgtgtgtgtgtgtgtgtgtatgtgtgtgtgtgtgtctgtctgtctgtctgtatctgtgtatctgtgggcaggagtgtgcatgtgtagctgtctatgtgtctgtgggcaggagtgtgagtgtgtgtgtgcttgctcgtgcagcagtgctcatgtagaagtcagcggatagctttcaggagtccattttctctcaccaggttggttcaagggatcagatcctggtgtcaggcttgcccagtgttctttactctgagccttctctctagtctcctatcttacattttcttctgtgttgtccttttgtagcctaggccaaacttgatcttgggattgtgtgtgcaccacttgatagactgtaaaaattactttaggaacttaaaaaaattgtgagaaaagggagccaaagtaaaatatctccgagactttcttgtcatcagatattccaagcttcagttttggttggctgctcgggcaccgtgggcacagagctgtgtcatgtccagttggctgcctggcaccatgggcacagagctttgtcatgtctggttggctgccgggcactgtgggcccagagctgtgtcatgtccagttctgtttccatacctagcactgcacttaattcctgtgggctgttgtggcttagcttgagctttgtgagacctggttcaaggttatgctggggaagtctagactgggccttgtcccaaggccagtatatccctcccacactgtctcagtgttggacagacctttctcaggtctctgctgactgctctcaagagttcaaaggggcctctcctctgcatgctgggtttttaaaaacgattctggcatctgcagactctggagggttgttaggctttccctctttgtgaactcaccctgtgcacaggacctggccaatcgcttcccacgctcatctgccggattcctctcctgctctgtgcgtgaattagtgttacctcagcctcactctctgagtctttagtaagaagcaggggcaacttgagggttcatttctcccctggtctctgttcttgcagtgtcttttttctggtgttagaagataatttacacacacacacacacacacacacacacacacacacacacacacacaccagagtcatttctgactgtttagaaatagtgtaaatacagccaggcagacatggcacatctttaatcccagcacttgggaggcggaggcaggtggatctctctgagttccaggacagccagagctacacagagaaaccctgtctcaaaaacaaacaaacaaagaaaagaaacagcatcacgatatttttctgtgaactgccgtgcagccaagcctgctgtcagaaggtggaaacaggttgggtgaatgacccagacacatgcacagagaagcactgtggccactctcctgctgcttgtcatccgttctggtggcctttgtttactcttgtgtaggatgcattgtcatcccatatttgtggaattaatgtgtttttctttcagttacattagttgatattttaaaagagcatcttactgtgtagcacaggctggcctggagtattctgtagcacaggctggccttaaacttgtggttccccagctccagcctctgagggctgggttaggggggtgggccactgtaccttgcattgagttttatctatagatctacattttaagtatgtagaaaatataagacagttagtatgtttgataataaatctggtaaagtgtttcttttgatcgtttaggtttgctgttggaaagaagaggggttaaatgtttctctttctttcttctagagacatattattacatttccccattagtgtgtgcctttttcttggctctgactcctatctggattataatagctgccaagcacccagctaccaggacagtgctccactcaggctgggagcctgtcataacagccatggttataagcaggtgagtgttggggtgggagagggagggaaggaagggaaaggggacagaggggggagagcgaatcgtggtctgtgtaggtatgtacatactaaaaaaatttcttggactggaaatgaggcatccgttagatgaagcctaacacagttgcagtatggaatattagcctcccagaaagacactgttaggcatctgtttctatggaaagatgttcagtccacacttaatgaaaactgtagtctggggaactaaggcttgtcctgttaagtgtggtaagctaagagtcttaggcagggtctggatttgggtaatacacaggtcagaatccagcttggaagaagagctagaggatgacagctgtgcctctgttctcaagaccagccacacagtgtagtggacagagagcagaaaaaaactcttaagaattaagagaaaaaaaaacccaactgtatggaaatgatggataattgcttcataggtttgctgtatcaagatgggctcgccatgattgacaggatacagagagaagggacttgtggaagctgtgaggagcatcctcttctgccatgagaggaagtcaccaaggagaggtctaacactgacactaagagacagcatttaagcatgctacttagaaacatagaagctacagtggaaacacatccttagtgcacagaaggtctggggatggggcaggaactactgtgatgatgtcagagctttggctctgctgttttgactgtcaagtctatcctgtgacagcatctggctcatcttgcttgcaagtagatggcatttcttaggacatttggccaacagggtcccgtggcactgtcttatagtgtgtaagccacagactgaaggtaaccagctaatacaaccttcaggatcgtaaccaagcctccaagttctactgacatactgaaagtgaatgacttgctgctgtgttctattaaagcaaccgtcttgcttgccagacttctcaagctcagctctctgtggtaatacggttataatctatctagttttagcacaatagaaatcaccctttaatgcctacttagttaaaaaatgaaaaatgcgggctggcgagatggctcagcggttaagagcaccgactgctctcccgaaggtcctgagttcaaatcccagcaaccacatggtggctcacaaccatctgtaatgagatctgatgcccttttctggtgtgtctgaagacagcaacagtatacttacatataacaataaataaatattaaaaaaaatgaaaaatgcagttagtttttgagttgtacagtaatagatgacagtattgtttgatcaccttcgaggctaagatggtgaatctctaggaggttgaggctatcctggtctactagcaagctccaggccagccaaggctatatagtgagaccctttctcaaacaaaacaaaacaaaacaagatattgtgcaaaagactatgaaggggccattagtcccgttgttttaagccccagaaatagttaaggatgccttgtaggtccttctagatagtttagtgtcgtacatatgtataagctgggaattgtgacacatacctataatcccagcacttgtgaggctgaggcaggaggattgctataagtccagggccatcttaggctatataacaagaccctgttccccaaagagggataaaagagataaataaataaacaaacccacacactaaacaaaaactaatacacacataactgatggttacagcatttcttatgttttttttttttttagtgtatgctatctgtgtatatgttcctgtgtgcccaggaatgcacctgcagaggtcagaggtcaacaccaggcacctgaatctctcctgttgtcccttatcttttctttttctctatattagtttttgacccaggctctcactgagcctgcagatcactgattggctagggagcccctgagatcttctgtgtccacctcccactgtagacattgcaggtcccccttcccacaggtggatttttatgtgggtgctgggctcagaactcaaggctttgtgttctatagcagttcctgactgctgacccctctcttcccccaaaggccctgcttttactgttaacattgctttctactttgactaatctttttcttttttttttctttttgtctgatttttacattgcacaaacactgtttcctgacaggtggagttgtctgaatgttggaccaagttgagatcatttttcatttctcttccctaatgtgtggttctcctcctttcagcatcgggggccttattctggacacaactgtatctgacccaaacttggttgggattgttgtttacacgccagttatcaacggtaagactcgaacgtgctatctcttgatgacatcactcttagagaccctcaggcatggcctcctacaccttctgttgctttcttcaaactcaaggtgtaactcaaattatcttccctggttcactgcatagaatactttgggaaagagctgtttctcgatttttgttacatgttggtttttttttttttttttttttttcgtttttcgagacagggtttctctatgtagccctggctgtcctggaactcactttgtagaccaggctggcctcgaactcagaaatccacctgcctctgtctcccaagtgctgggattaaaggtgtgcactaccacgcctggccggcacacctgacttttaaggctaatgtgacaaaatacagtattttggtttatctggtggtttggtttttttttttttttcttcccctggatgtcctatagaccaggctggccacaaattcacagatccagcctttgcctcctgagtgctgaaattaaaggtgtgtgctactacacctagctttttaaaaaaaataattttaaatatgagtgtgtgtgtgtgtgtgtgtgtgtgtgtgtgtgtgtgtgtgtgtgtggtatgtgcaggtgccagcagcggccgtaggcatgggatttccctggagctggagttatgtaagtgtcaattacctgcctgacatggcgatgggaaccaaactcaggtcctctgcaggagcgctgcgtgctctgaaccactgggccagctctccaggtcccgcttcttacctgctgcttcttgcctttgctgcttaccttggtagaagccgagttagtcagacttgatcattgcccgacttcattccattcactaagataggctactctactcatacgtgcgaactatgcctcagactttacttgcctgtaaagtggaaattataatccatatattaaatacttgtaatatgtacattaaagaatcatgacaatttaatccgtctctactgtttttggaagtggtggttattaagactgacttcagtatagcctaggttgacatgatttaaaaagtaccttggcataccatacatttaccatatgttatttttctttttttaaaaagattttactttctatattcacataaaaatctatacaatgacattttctgcagaagtctagttttgatctaagatttctactgacattgtaatttttgtctgcctttggaatgtcaaggaattcccagctgtctcttgttatccctcaaagccatggaagtgtctggttctatctgctccatctctctgacttgaacattaccaacccttgtcgttgcccctcacaagcctggcttgttccatttgtgtatacagtgtcgtgtctctccactgcactggggccatccttttgagtaatgaagtaaccttccctagtgattgcctgcacaatgcacatcgttgctaagatgttagtcttccataaacattgtttgtgtcctgtcagtcagaagatgagtttctctgtgggttttccctgggtgtcataacaaatctgaattccactggcctccaaagccttggctactccgttggactcagtgatcccggaagaagcaccaaaccactcccacacttcctagtaagaggcgccaaactaccccagtggttactactaagactcatcaaacttacaagattttgtaccatccttaccatcgtcctcagtttcactagcagagcaggcatacctttccttccacctgttcctcctctccaatgactataacaaacccattagcttaagtgttactggattgagctgcattgaataacatcacaggtaacttaaatggaaacgatcctttactcgttagactctcctgactctttcagttgcttcaccttttacaagaaaccaagttagagaatcatgacagactcccttgttagtctgtgctgtgacatcatgtggctaagtccttcttgttatgccaacgggtaaacctcttagttggattctgttaaattccacccttagatacaatggtagagacattcatattctcaaatagaactgaattgcatttaaaacaacttgactagatttcgtcatatatgtgaatgttttgcctgcatgtatgtctgtgcacctcgtgcatgcctgatgcccacagaggtcagaggagggcactgaatctcctgcaactggagttacagatggctgtaaaccaccatgtgggttctggagagggaccgtgggtcctctgcaataagtgctcttaaccactgagtaattccgaaatatataaggaatgtgccgtttctctttccctcttctcctcataatctaatatttattatgtatctacataagtatcaagtgactacaagtcttttaagcatattatatataatttaatactcatttaagtaattagtccaagattaaatatctagtgaatgatgctaagtcacactttaaaggcagatctgcttaatttccaaactagtaggttttttttctctcaaatcgtagaactactaatttatctaatttagtttacacacaagtacatgtgtttaaagttaagcttatctgtgctgatctgactaaaatattattaaacatttacaggcctcagagctaataggaatttctacagtgcattggtcacactcgctctgtaagatattagtaagtacaatttcagaagtgagttctgtgattagctaaagtcggtaaatattaagtttacagagttcttgactacaggatatcgtaagccattctgtgggtctctcttttgggtatgtctgggctagatgtgttgacgaaccccactgaacttgggcttatatatcctttatttacttattagtgaaactcggggtgaactgacagcctctcacatgctacaggaaatcactctgtcactgagatttatcctcaacccacagtctcttttctttttaaatattttattctttgagaatgccacacagttttgatcatctcccaccctactcctcctcttgactgctcccagatcctcccacactcccccctcctccaatgtcctcttcctttcttttttaaacaacctatcacctttaatttgtgttagggtttggggcagccactggaacgtagtttaccaggaacaacacccttaaagaaaactgactttccctcctccagaactcatcactgttactgtccgtaactcatcagttagggttagaggcttctgaacaccccagcacacacacacacacacacacacacacacacacacacacacacacacacagagcaagaatgttgactgggttgggtagatcttatgcaggcaaccacagctactgtgaattcatgagcactgcagtctgtcctgtccaggagacattgttttggtcttgaagtcttccacagtggttcctaagctctggggaaggatgtgatagggacctccgtttgtggctgagtattccactaacagcttttctctgtacgttgacttgttgggagtttctgcattaacaacagcctgtatctggaggccccactaacctgtgagtagagacataaacagtagagaaagggcagttatggaccaggtccatttatcagaataaagtcgtggcttacttactcccagggcttgtaggcctcccaggcatgggttcttgctaaggttttatacctggcttgtgcttgtggaatgggccttaaatccaagcagaaagtgcttgcatgggtaggcttctcgtgcttatactagttcttattgcggttcacaaagttcacagctgagtgagattgttgatgaccccgcccctaattaagcagcccacatagcaccttctagtattatgaaactaaggagaaagttttctgagtcagcaccaacttggtttctccaagttctgtaaccagtgcacatggtgtcttcagcaaggtcttaacatggagttgtagtaggtaatcaagaacactagcaatagcctgtattgttttgggggcattccgcaatctattctcaaatgataaaatatcactttgtatataggatcagagacatgattcagtatacactttgatcttctgttatatttttgttttaaactctatagtacaatattactctttgtgctttagttattttataaaactattaaacataataaaagtggtattttctgttttcttacacagactggcatttccagctctttcctttatgcacatacacttccatctgaatgcatgcattccccatctgcttgaagaagtttctctggtgtttctcagagggcaagcctgcagagaaagcatagacttcgggcatggtctcacccagcgtgatgttcttccattctctctcctctgttttcatctttggctgtgcctgtctgaacttcttgcacatgagcagcacttggctcatgtgatgcacttgcagcctgggtgggcatcgttacatcagctccacgggaaccttactccacctctgtctgtcattatctctgtctgtctgtctgtctgtctgtctgtctgtctgtctgttctatcacctgtgccttcctctcttctgttttttttttccctatgcatgtgctaagtctttggtgctaatcacatttccctgcccttcctcaattcactgccatggcttttggccctctcacttgacagcactccttttactaggctgtccagtgacctaatttctttatccactgcttgttttcagtctcaatcccactcagttatgtaaaagtaacttttgttcacttgatgtaattgttgtctgtaattgtcatctcagaggcttactgcggaacaagctcagccttgctagttctttctgaactctggctgactggttgaactctgtgctgactcaaactcctctccaagctgactgattcattgtggcttctctcagcttctcagtgaattgctctgcttggcctcatgctaactctgacagtttatctgaatcttctgtctccttcttattctctggcttcgactgcctctgctgacctgcactgaaatgcatgaactgaataatgaactccaatccattgcactgtactcaccatactgactcccaacactctgtctctgtctctctctctctctctctctctctctctctctctctctctctctctctctgcctgctcttcaatagtctctctttcctgtgctgttctcctgattgttaagcatatcctgtctctgactcattctgccaaatctttttctgattcaccactttgtctgcccctcaattagatgtcactttcaaacatggccacttccttctacaaactaacttctccttaaaggtgtgtactatgggcctgtactatggacgtgtctgtatcccagccagagggattcaaggtgtgtggcgagtcttcctttcagcagacctaggaggcctttggatgtgatcccttgccagagcagacaccgcgggattaaagcccctctgtcagctgtggatgtgctcttccccactctctcagttctcatttcgttctctggagatcctctcctgagcctcctgtgttcttcctgctggccaagcatttgtattcctcaagcatttggatggtactgtctagttcagagacttttcaaaatagagtccccaggctgccagcactgccagggactgtcagaaacatggattctcaagattgacttggaaaccctgggatggagcccctccatggactctgagaacatatgtctgagggacccttctcttgccacatggttttatagcttcgattttgacttttatgttcatctccagattcgtatttttttttatcagacagtttacttaatgtgtagctcaagctggctctaaacttgccatccttctgtctcagacttccaagagctgaagttacagacttaagctaccatgcctggctcagattcatactgtaagttggcatttttacatagaaggtccaaactcctaatgaactcgatgtcttccccctaacctctccttctccctcccgcatctgttaaacagtatggttgtctaccagtattcctgctagggcagcttaaagtcatgtgctcgccctcctttatgctcaaggtccccagctcttgaaataacttctaaattagctttgtcactttgcctttaaaaaaaaaaaacattgaaagtagtttttgtttaatataatatgttctgagcatggttcccctcccctgacttttcccagatctttgccactttgccacccacccaaattacacattctctctctctctcattaagatacaaacaagcatctaaaaataaaaataaaaaaagagataaaattgggttaaaaacacagaaaccaggataggacaaagtaaagagaagaaaagaaaatgctcaagaaacattggctcagagacacacccatcacaaaccagaatcccataaaacacaacaaaaccagaatccataacgtatacatggttacaaaacagacagacagtcagacagacagacagacagacagacaggcaggcaggcaggcagatagaacattatgagataaagaaccttccaaaatgctgctgagtttgtgttatgctggccatctactgcttggcatggggcctggctttaggattggtttatagacccagtgagtctccattggcgaaaaccaattttagaaaaattagctcaattggagctagcttctgagttagggatgtgggcttgttccccgccccctgtaccccccattcccagccctggcgtaccccatcaggcccagacccatgcaggcccctgtgtgttttaccacagactctgtgatttcctttgtacgtcagtcctactgtgtgcagaaagccttgtttccttcatccactctagctcttacactctctgccttttctgcggcagagttccctgaaccctgagggagggattggaacacacatcccatttaagactgagtgttccaaggtctctctctgcacatcatccagctgtgggtctctgtttattcccatttattgtggaaggaaacttctctgatgatggatgaggaagacagtgacctatgagtatagtagcatgtcactaggagtcacttttattgcgatgttcctttagcaggacagtagcatttggtttcccctttggtcctctggcctgtctggcctcaggttcttagcagcctgagcagtgttgggaaagggcttcatctcatggactgggccttagattcaatcagacattgagtggttgctcccacaagctctgtgctactattgcacaccatatcttacaggcaggtcaccattgtagactgaggggactgcagctcggttgatgttcacctttctcttctggtatgcacagtaccttccagtacagtggacattagttagtaggtgcaaagactctaggaagacattgacttttttcagtgagttgtatatgggttttcttcagcaataggactttagcatcagtttgtggagagcaaccaataacctgggtcgttgggggtctccatggagcccctttggccagcaactcaattaggtaaaacccattccctgaactggagacttcatttggtgacaagacatgttcagttggggctcctgctcacctgttatttgacgattccatttagatcaccttcttgtgagtgtgtgtgtgtgtgtgtgtgtgtgtactgtattagggttccgtatgacccctcaaatggcctttagttttacctttccctctctatattcctctgttatccccttctctatccaccttcccatttatcctcccattccagtctctcccctcataattatatattctacagctccctcataggacaatacagctatccctattagtatctcactgtattatctaaactctggttatatggatggtagcctgctaccatatataagtgtcatttgtctttcgggttcagttacctcactcaggtgatttttttttgctagctccacccatttatctgataatttcatgatttcagttattttaaaagctgtgcaatctttcattgtgtaagtgtactgcatttctctatctattcatccattgacagacatctagcctgtttctaatttctggttattatgtatggagcagcaatgaccatggctgagcaaatgtctcagtagtaggatgtagggtccattgggtatatgcctgagtgatttagcactaatagatctattcccacttcctgagaaaccggcagactgacctccacagtagcttacacgtttgcagccccaccagcatgcagcagtgtcccccttacttcctatccccaccagtgtgagctgctacttgttttattgatcttggtcattgtgactagtgttaaaagagatctcagagtaatttttatttacattcccctgatgactaagaatgctgaacatttaagtgtttctcagacatttgagaacacagtgtatgctgtatatctgagaatatctgtgccccattttaattgcgctgtttcttgatgtctgtctttttcttgagttctttacatattttagatatctgccctctattgaatgttagttggtaaaaaaatctttttcctattctgtagtcttgtcctggtgatggtgactttgccatacagaagctgttcagtttcatgaggtcttatttttttaattgttagtcttcgtgcctgtgctattggtgtcctgctcagaaagtctttccctgtgtcagtgtgttcaaggcaattccccaagttctctttgatcaaattcagtgtatttggctttacattgaggtgtttgattcatctggagttgagtttttgcagagaaataattttccccttcctgtttatattctcttgatcgcattcatttttttctctgctctagctaagacttcaagtactgtgctgaataggtaatggagaaagtgggcaaccttgttcttgattttagtggaattgctttgagtttgtctctatttagtttgttgttggttatgggattgctgtaaattgtatttattatgttaaggtatttgttattgtatatattaagttattatatccttatatgctcagtacttttattatgaaggggtgtttgattttgctaagggctttttatgtatccaatgagatgatcatgtggtttttgtgtttcaatctatttatatggtaattaatttatcaatttatatatgttgaaccattcctgtgtctctgggatgaagtatacttaatcatgatcgatggtctttttaatatgttcttgtatttggtttgcaaatattttattgagaagtttttcatttatgcacataatggtaattggtcctcttttttgagtctttaggggatttaggataactgtggtctcattaagaaattgtgcaatgcacattgcacctcacacaataatagtgggagacttcaacacccactctcgtcaatggacagatcatggaaacacaaactaaatagagacacagtgacactaacagaagttatggactaaatggatttctacagaacattttattctaaaacaaaaggatataccttcttctcagcacctcatggtaccttctctagaattgaccatataattggtcacaaaacaggcctcaacagatacaagaagactgaaataatcccatgcatcctatcagatcaccatggactaaggctgatcttcaatagcaacaaaaacaacagaaagtccacattcacatggaagctgaacaatgccttactaaatgataacttggtcaaggaagaaataaagaaagaaatttaaaacattttagaatttaatgaaaatgaaggcacaatatacccaaacttatgggacacaatgaaagcatttctaagaggaaaactcatagctctgagtgcctccaaaaagaaactggagtgagcatacactagtagcttaacaggacacctgaaagttctagaaaaaaaaataagcaaatatttccaagaggagtagatggcacaaaatttatttattttatgtatatgagtacactgtagctgtacagatggttgtgagccaccatgtggttgctgggatttgaactcaggactttcggaagagcagtcagtgctcttacccactgagccatctcaccagcactattctgtcattctttgctataaaaattctcttttggactggtgagctggctcagtgtggtcaaggcacttgccaccaagatggagttgcatcccccaggatccgcatggtggagggagagaactggctcctgcaagttgtcctctgacgtgaatgggcacctgattcacacaaacaatatgatggtggtggtggtggtggtggtggtggtggtggtggtgataaaaacttacatttctagcaaatcagattatgcccttgctcaaagatagacttccctttcccttcctgtggagttagcatgggttagttagcctaactctctgggcccagtctcacatccccctccccacacattaaggtctccccttgttgagtggctccttgctttcctggtcaggagcgtccctgcctgacatcacagtgctgcacgtgttctcactatcctccatgtgcccagggtgcgcgtgtcacgtggcacccatccccaaggcatgtgtttacggagttgtttgctcccttttctgtgcttccctgctacgcttttagcaattgtactgcagcgtgtgtttattttgaatgataacttctgtttgctatgactctgaataatgcccacagtgtgaaggttgggcaattgttgtatgaataaatgtatgagttaaggagtaaatttcattttgctgcaaactacatgtcactgaatcagaggaaattatcatgttaaataatacaacttagaacataaaacaacttcacagactttagaggaaactgttaaggtatatttaaggaggcaaaaataggaaaagatggctttttctgcttatataaaattttcagcaatgttggcaacattaattctttccttaataatttctcctggctataacgagagaaactgacttaatatcaatctctcatctcttctgtgtgttcggcttcccagactctttagaaaggaatatttaggcaaggcatctttagatactaagtgagagttaaagatcagaagtggattctttgcaggcagaagaaagttgagacctgtgacatgggctcagaggagagggtttgtcaccaaggcagacaaatggggtcagtacctagaacccacgtagtggatggagagaatggacacctgtgagctgtcccctgacatctatcccccccaaagtaaacaaataaatattaggaaggaagaaaagagttggcttgggtgtccatccttagaggaaagagagcaccatgtatttggggatgtaagagtaaggctcgggccaggtgtggtggcacatgcctttaatcccagcacttaggaggcagaggcaggcagatttctgagttcaaggccagccttgtctacaaagtgagttccaggacagccaggactatacagagaaatcctgtcaaaccaaaaaccaaaaaaaaaaaaaaaaaaaaaaaagagtaaggttcggttagtagcaggggaagtaagggaaggtggagtctcttagtggagtatctttaatagtgaaagtgaaggagagtgtactgagacctgggaacgccatgtacggtgtgatgtcctttatataaatcctataagctggaaaactaagcagaacacacaatttgagaaacccacaaaaatgcagaagtatggaagactctaaggcagttgtggtaggggaggaggggtgggagggaggaccacctgtgataggggaggagggggtgggagggaggacaacagggcactgctggggagaggggacactccttgtaaatacagcaggggcccaggggtggtgctttatagtctatgtttgcttatacatggtttttgttttcttttttttaaggtcgttacactttttcttcatgtacaaagacagcacgatcagtttcactgggtagacactgttgaataacacactcaaggtcacttagtccaacttaatgaagcctttgatggcatgtgttgagcccacaagtccaggtcagactgtatctttacatcagacttagagcagacacagcaagagcgagaaccctggccaaagtgccatgggtgattccagtagagctgcggctccatcttgtcttcagacaaccatgaggaaaaagacttttttatagattcgggggcggggcagggtttctctgtgtagccatggctgtcctggaactcactctgtagactaggctggcctggaattcacagaaatcttcctgcctctacctcctaagtgctgggattaaacaaccaccccgttttgtttgtttcaagacaggttttatctttgtaacaatcctgggtgtcctggaactggctttgtagatcaggttgccctcaaactcagatctgcctgcctctgcctccctatgagtgtgtcatatttattgaatattagggtgctgaaggccttggaaagataagccacaccgtccagtcagcgtgagagaagggatccatccctgagaagtggtggaaacagggaggaggggagggacgagggattaggatggggacttagggctgaagcctcacttgtcccaggtcaagtagacagatttagttaccagcacagctcctctcaacctctgtccatgtcacagtgcatgaagaggaaagccataatgtttgaatgatgtactaggctgaaggaggcacttgaggttattctaagagttagagggttgtctcaccatgcctgtaattcatttcccacacaccaggtagggaggactaatctagggcagtcatttgtaagctgggttttttttcactacactttctgaaggagccatttaaaataatttcccccaaagatggctacatgagtataacattacagattccctgtgtgtctatttatatctgttatacagtactgcatagtgcaaagttacacatatacatatttatcacatgattatattataaatgtatatggaaaatctatattctttatacattaaagaatgtatacagtatatactttatacatggaaggaatacagtatttttgccctcactagtaatgaatgagctacaatggaaaatgcagaggtcagtcattagccagtttatgcaaattatggaaaataaagagagtgcatggggaacgggaatttagtgtacctgcccatatccagatggaagggctccacctgcacctgaaagacaggaaaatggagaccgtctctccatccctgtgaacggaggacatctctccattcctgtgcatgttttgaaactgaagagtaattactgcacgtgagcgctgatgaggagccctgcctagaggatgtacttacgggggcacatggaaggggctgtatcacttgccaaggagattgggagcagatagtgctttttaaggaaataaacttttgtattaggttccattgagaacgtgcaaaaggaattctcccccccccctttttttgtttttttgttttgttttgttttgttttttgttttttcgagacagggtttctctgtgtagccctggctgtcctggaactcactctgtagaccaggctggccttgaactcagaaatccgcctgcctctgcctcccaagtgctgggattaaaggcgtgcgccaccactgcctggcagtaacagaattctaaaggactccctagatgaacttgctgctaatttcttcttagcatcaggtatttacacaattaatgagcttattccagcataatgtacttaaaattaggacctgtggataccgaggagtcttataatagtgacaggctgtctcttctgatgtttttaatttataggagactatctttagatgcttcctgctacctttaatcatgcagttagtatctgtagaatttaaataattcaaacgctgtattaataacaagttttaaaagtgacagtgtataaaacagtaccaagaaagcatactgacatcaaagaaagctgctcgaaggtaataatttttgcagtaattaaaaattacttgtcagtgatcctaacaagaccatggaaggctggcgcttattagtcagtcgctcgctggttacgctatttctttacatggtattcacttcgtctggaagagtagccctggtgtatttcttaagttgactgaggaaagctttgagatgacttatcccgtgtgctagtccccagcatatggtagcacggaagcgataaatgctgcttctgtaggcttctatcaaggcatctgtgcctttcagagggagctacaagtgaccattaatagctcaatctccatgaaatcgcagctatagtaggtcgctcaagccttacagcacatgctgcctctatgtgcactgaagcgtcccacgtctaacgagacaccagatggagcattgctctccgagtccccagagggaagaagagaagaaacgagcagaggtgtgtgcattcctgtggctggcgttgaaaagtgttatctgcagcagtttgctttcttaccgtcggattcttctgcatttggagaggctgtgagccatgaatgtccatggatgattacaaggtcccatcttcctctctgtgtcccccaaatctctgtgacagtgcttcagttctttaggacaaatgctctgtttctctcagtggctgggatgcgttaattcactatcagcatagtgagttactggccttgtgttgtactgtgagcacatgtacggttggtgttagttgtgggtgctcctgtgttgtcctgtggcaggtgtacagttcatgccagctgtgggttctctgatctcatcgcttactttcagaagtgagctctgagtggaaaatccaggcttaagaacatagttgtcataagcgtctaatagacaagccagtatgcaggggctggggcaatgactcagagggcgtcacactgaagacctgaatttgacttgccaccaaacccaggttaaagctgagtaccataagttcacttatgatgtgtagacaagagggtttctggaagcttgtagccccctagcctagagtacacagtgacaagacaatgacgagaaagagacctctatcacacacccggggttcctctgtggcctccatatgtgtgttacggcacgcgtacacacacacacacacacacacacacacacacacacacacacacacacacacagaagaaactcaacaaagaagcagaagttattctaagttggtaaggataccagactgagcatggtggtgcacactgttagtcccagcactcagaaggcagatgcaggtggatctgtgtgagtttgaggccagcctggttgaaacacttccaggtcagccaggagtacacagtaagactgtacctgtcttagttaccgtttctattgctgtgatgaaacaccacagtaccaagaaacttggggaggaaatgattggtttcagtgcacacttccaggtttctgttactgaaaaagatcaaggcaggaactcacacagggcaggaacctggaggcgggagctgatgcagaggccatagaggtgtgctgcttactggcttgcttcccctggcttggtcagcctgataccttatagagcccaggactaccctgtccaaggatggcaccatccacaatgagtgggtgccttcccccactgattaagaaaatgctctacaggcaagcctgcactccaattttatggaggcattttcttaattgtggctccttcctctcagctgactccaaataaatggaaaagcagaacagctctgtactggctggttttgtgtgtcaacttgacacaggctggagttatcacagagaaaggagcttcagttgaggaaatgcctccatgagacccagctgtaaggcattttctcaattagtgatcaagggggaaaggcccttgtgggtgggaccatctctgggctggtagtcttgggttctataagagagcaggctgagcaagccaggggaagcaagccagtaaagaacatccctccatggcctctgcatcagctcctgctttctgacctgcttgagttccagtcctgacttcctttggtgatgaacagtatggaagtgtaagctaaataaaccctttcctccccaacttgcttcttggtcatgatgtttgtgcaggaatagaaaccctgactaagacaagctccttgctagcttctgactgcctgacgaatttgacaatcgtgctaagtgaagggcttccaataggaaacattgagttagggacagactctctgtaaattgcttgttgatgctgttggcagttaacatacattgtttaattatttcaacatccttacaaggattgtctgtccgtacattcacattagaaaaggaagtgtctgagaggcgcctgtgctgaaggcgggctgagtgtctggggcagggttcagcccttgtgccggagctgggagctgcggggacagagctctgcatgcatgtgccccagtgactctgccggctgggtgacttttaaacttaattttaaatacatttgtttccattagatgagtgtccagaatattgtagggtgtagtttttaaaaaatttcttaacataaagcgaattaatttatttgtgtttacgtttaatattgttattcatattctctctctctctctctctctctctttctctctctctctctctctctctctctccctccctccctccctctctctctctgccagaagacaaccttaggagttggttctctccaattactttatctttaaatttaattgtagaagtaccaggcttttttgttagcatcctttgttctcaaataacaacacagagacccggtctctttattaaacactgtcttgcacaagagctgggcagggttctcatctgttctaacccaacagtgctgctaactaccatgtgcctgtgccatgtgccctgttagctgccaccacatgtgccatgtgccctgttagctgccacctcagtcctgccctggctgctcctgctccaccctcctcccttggtgactgtctctcacagggactccctctggtgaatcctctctcctggtccctaccagagactctgtaacacggaagcaagagatgcttgacaatgccagcatctggactgcagccagatgtctgggtacagaagtcagcatctgaatacacagtgcacagggccattccccaacattcagtgttgttgttggtatgtgtgtgtggaggggtgaagacagcctctggttagtattgttgttgttgggggtggggtggggtggggtggggtggggtggggtggggtggggtaggggctgaaggcagcctctggagttggttcctaccttttcacagtggagtctgggggatcaaacttggggttgtcaggttttgtgagttgaaatgtctctctggttctaagtggttgtctttattatccttaaaaaaaaattatgttgtttatatgagtatggggtagtattggcatgtaagtgtagatgtccacagaaaccagagctgtcaggtctcctggagtctgacatagtgctgggaactgaacttaggccccctgcaaggacgggacaagcctgtagccacagaaccacctctccagctcctctgagctccgtttgaaatcatcgtgtttattgtttgagtctgagacaggacctgattatgtagctgaactcagttctcctgcttagactgcccccctgtgctgtgactacaggtgtgcactgccacacccgcatctgctcttagtgacatttgttgcttgttcatgacacatgacaatgaaatcgtgatgctaaatttagtttttgcctttaaaaatatgaccaaatcgttttagatttagtccactaacaataacagcaacaaattatctcctctgttggaaaatggcaagttcatgctctttttggtggttattttctattcttatcttttctgtgattaaagtaattaaattcttacttccatagtaagttaacttcattgggatgtgtccgaacatcaacatttcaccagatgacagatatgcagtcactgagcttgtgtttatttctattcttcgagacagcatcttattatttgtaaccctggctggcctggaactcacagagagccacctgcctctgtctcctgagctcttagatcaaaggtgtccaaacttgtcactttgaatgtaattgtatacattcccaggcccactgctaagcctcagaagctcttaatactgagttatccatgctaagttacatgttgctggttgctctaagccatctcctaagttgtgcagaaaagaatccatcttctagcaacaggtccaaagctctgttagagaaagtgaggccgtctcactggtctggagtgagtctcactggtgtggagtcttactggactgggttcactggactgtaggctcactggactgtaggctcactggactgtaggctcactggtcaggactctcactgggctggaggctcactggtcaggactcttacaggttaggactctcacaggtcaggactcttgctggaatgtaggcccactggagtgtaggctcactggtcaggactctcactggtcaggactctcacaggtcaggactcttgctggactgtagtcccactggactgtaggctcactggtcaggactctcacaggttagggccttcacaggtcataatcctcactagtcaggactctcactggtccatgaggtatactggtcaggaccctcactggtcaggaggtatactggtcaggactattactgggctgtactggtcaggactctcactggtctggaggctcactgggctgtggtctctggtctagatcactgggattcatagtatgtgcatgtcttagttacttttatacttccatgaaaaagcaccatgaccaaggcaagtcataaacaaaagcacataattgggggcttgcttacagtttcagagggtgagtctccttcagggagcatggggataaacggtcaggcatggtgatggagcagtggctgagagcttacaggttgatatgcaggaggcagagtgcataccagaaagacagagaaagagacactttccatcatggcatggaatggcaggggcttttgaaaacctcaagtccaccacagtgacacacctcctaatccttcccaaacagttccaccaactgggaaccacacatttaaacactgatcccatgggggccatgctctctcaaaccaccatagagacaatctacagtggagacttcatcagatctgctggtccctagtgcctggtacagacatcctcttgaatgctttttaccatttgtattcgaaaatctccctctctggtagccatgtaaagcagaatgacattgtgggcaatgacttcctatatgatgacagtactagtttgtacagcaggcttactcttattcagtctgttatgtaagaagaaatgttaacaatgagttgagcagagtatgcccccatcattaaacagtgtgtgactatccatccaattcagatggagtcttgatgaattcatgttatccttccaatcctagcactggcactaaatagaccgttctcaaaagatgtactaacagccctcagcaccaaccagggatatacaagtcaaagccacagtgatccaggatgccattctgtaagagtggctgttctccaagagacaaaaggaaaataccagtgacgcaatgggaagaaaggaacccttgtatcctgctacatagtcactgaggaaaagcgttaacatgactgcacaatccgtcaatccctctgctgggtacatagccaaaggaaataaaatcaatgtgtcagagacgtttacacttccctgtttactgaagcactgctcacaatagctaaggatggaagcaatttaatatgtcactagatgaatggatgaaggaaatgtattctaaacaaacagagggatactcttcagagataaaagagaatgaagtctggccacttgtgtaacatggaagagagatgattatgttgactgaaagaagccaaacacagagagacagtgctgtgggaatgccagtcagatgaacctgaaaaagttaccttcctaggctctctccgtacagtggtgtagtagccagggagagctgtggtgtgcgtgtgcctgtgtgcgtgcctgtgcatgtgtgtgtgtgcacgctgatccgtggttgaggtactgactgagtggaaagatgtgccacgcaaataaatacaaataatgtgtatgttgccttcccgaagctaggaaaatccattttgaatgtttataattgcagtatctaatgacaataggataaatatttaagaagacaagtatatttaactgaaacattacagcgtatagtacagcatccaatgtaatcccactagtgtgaacagcctttctggttttatttattggttaaaatgggtctggcctatgctgctcaggttgtgaggggctcaggtaatcctcccaccctagtctccagactgtaccctgcattcagctcctgcttaaagtgaaaagcactcttttgcgttaaaaaagatttccaggcctagagagatggctcaggtgttgagagcatttgctgctctgccagaggacccgagttcagagttaagttcccaccattcctggcacccacaggcagctcacacctgcctgtaactccagttgcagggactctggtgatgttcccttgacctcagtgggcatctccacgtacatgtgcaaatgcgcacactcaggcttatgcgcacactcaggtttatgcacacactcagacttatgtgcacactcaggcttctgtgcacagtcaggcttatttgcacacttaggtttacacgcacactcaagcttatgtgcacactcaggcttatacacacgctcaggcttatgtgcacagtcaggcttatgtgcacactcaggcttatgtacacactcaggcttatgtgcacactcaggcttatgtgcacatctgcataaaagtgcttcaaaaagcacttttaaaaagaaaagctttccagttctttctatttcatatgtttttttctgagctcctttttctaactggtatatataagctgtccccgcccatctttttaagcagggcagaatgaaatcactgggctgtagggtgcgcacatcaccttcattacatagttctaaagtgttttccatagggattctaacaatttagaccgtgtgtgtgtgtgtgtgtgtgtgtgtgtgtgtgtgtgttgtgctcttccactgtctacctttttcccttgagatggggtctctcactgagcctggaccttacgagtggctacagccccatgaacttctactactgagttctgacagaatgtgggttataggcatatgcccagggtttacacgggtgctggtcctcaagtttgtgtggcaaactctcttacccactgtcccccatctccagctcctgggtgaacttctttgagagccaatcaatctgctaaaccccttggcctttttctgtggacagttacttggggttgtagattttttccactctgttgcttgttttccctctttgactaaagcgttttctagtcagccaaaggtttaaagtttataaactttccctttatgttatacagttttgttcaaaaagaattctttccacatgtattagtcaagattctccaaagagtgaaagtggaaaggggtgaggagagagagggggagggagggaaggagggggnnnnnnnnnnnnnnnnnnnnnnnnnnnnnnnnnnnnnnnnnnnnnnnnnnnnnnnnngaagggaaaggaagggggagagagagagagagagagagagagagagagagaacattaattgatagtcaaattggctatgcagttatggaggctaagaagcctttcaagaggccacttagagtgagccgcagtcccagcctcagaacccctggtccttttccttctctccaggggccagatgatggatgctcactgaggacagttcttttccctcagtcttccagctcacatgctcatctcatcgagactgactgtcccattcacacccagaaacggtctttctccatttacccacaatccttgatcccgtcaagctgattcggaacactagctgtctttctacaacttagcaattttgccttttggattatgtttttaatttacctggaattgggttttgtgtttgggatgagcgtcaggaccagatttcttggttgttttacacattactatctggctgactcatatggcttactgaggagccatctgctatgccccgtcctgtccagcttgcattgatatcatttagagctttttgccttgctaagagcttttaatcatgactgttgaattgtgtcaggtttccccctcacatgttcttataatcatgttacttttccccgtccatttacttgttaatgaattatgttaatttacttccagctgttaaattggtctttcattcccttggataagcccaatttggttgtgacctatctatcacacattgagtattttgctgaatttgatttgctaattgtttggaatggaagttatttcatgatattcctataatattttttttctcttttgtatgtgtttactgaaatggtggtgaattctgtttaattctccatttttaatattgggctgctttttaaaaatatatagttatgtgcatggagaggcagtttgtccacaggcacgcagtgccccccccccccggagctggagttataaaaggttgtaagcccaagtgggtcccctgcagggactctgtgaactcgctctcagagcctcctcttccctccttcacttgttcatttctgagacagccttactctgtagcaaataagtaatgttagcatagaactcaaggtgtatgccggggatggcttcagacttacaactgtccctttccctccccatccctcccctcctctgtcctcccctcctctccctttcctctcccctccccctcccatgctccctacctgactctcctcccttttgttcacttggccaaaggcctctggttgatgtctttgctgttttttctcttgtgttgacttgtgctcttctgcctaccatcccttctttcctcttgtagccttttgaggttttaaggctgtgagcttggcatcatccatatgcagacttttcctgtgtgtcagtggaaggcgtgcctcggatttcagtgcgctgccgtctgcgcctcccatgcatgcagttctgggtgttacatttttgttacattgactatgctttccacgctgtctgtgatctcttctctgacctgtaagttatttggaagcacactgtttactttcacagtatttgcataggggagtcccaggtgtcggttttcctggtgtgtccagagaacaactttgacatgtttcagtcattccaaactcacggagacttgtcctgtagcctgtagtttgtgtttgtgagtggcccatgggtactttgtaaggtgtgtcaaggtatctttagtactgttctcaactgtaccactttcctgggatactgatactgctccttcagcattgtgtgtatctagtgtgtgtgtgtgtgtgtgtgtgtgtgtgtatatatatatatatatatatatatatatatatatatatatatattcatagtttagctaatctctgccccatatttattgtgtgttatatactttccctatcattgtcaaatcatttctttacctgggcatggtagcctatacctgtaatcctagcacttgggagtgggttagatcaggagttcaaggtcatagcaagctcaaggtcaacctgaaatacaagagcccctgtctcaaatcccaaatgacaatggtaataataacaattattatttgaacacccgaagcatctctgggtttggttttgctaatgtattagctgctacagtaggctgtttcctttgctgccttttatcccctggcttgtaaagtttcattcaatgtttgactttgtatataaaagaccactggagactcagataagaattatttgtgcctagcaatgaacatatctttccttttgttagtggagaggttggggcagtccgtggacagtggttccttcagtattcctgctacacatctctccagcggtgggttcttgagtgaccgagtgtgggtggtgtgacatggctcctggtggtcttgttgttcttcctgtgaccacatgctgacgctttccccctacgtgatgtgtgctaggcttttcttaccttactttatctccacagtccctggacctggtcctgagaaacagggtagggtattcgaagtggttcttctctttcctcttcccccattggcagatattccttcatcctgtggcaattgctctgcccaggaccttgcagacaaagcagttcctccacctctcaggtggcttggctttatgtgagaggatttgtgtggcgccaggtctggaggtggttaagatggtatcccaggagcttggaaggtctctcgctatctagtaaacttgccctgtatctggcagtcagcctctccgatgggtgtgctggcccgtgtgctgtgtagaagaacttggaagtggcatttgccttcttctcctttgcttttgtggccgttgtctctccctcactgactgcaagaggagaaagactccgaatgccctctctcaccttggaattcattccttacctcagcattaactcttccgcctctgaatcagggagaggctgtttctaagctgaaactggttctgacctgagtaatttcattccactcctaattcgtgtccctcagcaagacaagacagtatcaagcctgtcactgtgaatagatctagcttatttttcctctcattaaggtggcaaatgtcaatctcttgttacctagttttgtgaattgattgcaagaatgattttttttttaaattacctatcccgatctactttcacattagacagccaatcagattctaaagtaatggtggtatttttacagtaatgatgttatgggtgatctatctcaacattaaataaactgccgtttcagagaaagatgtgtttccttggcctagcatgtggcagaaagaggcttccttggtgggatttatgaagttgtttaagtgaaaggtaacaggcttccctgtttttcccactgttttagggatcggtggcaatttggtggccattcaggctagcaggatttctacctacctccatttacatagcatccccggagaactacctgaggagcccaaaggctgttcctacccatttaggacattttttggttcaggtaagtgttgcgtggggttgggttgtgtgtattttgtgaggaactgctgcccgctgagacctagggcaggcaaaatttgttgaatctatattttgtgcatgctgggctgagctaatgtcagggaacaaaggccctctgtgtccatgtgtgtcattgcactttgttcctgtctctgggatatcttgttggctaagaaaggaaccgcatgcacacacacagaagcctcccttgacagatggtcctttcttccgtatcactcctgttgactctttaaaatgtgggtatttgctctgaaacaggacattaggagacagcccagtggcagggaacagtatgtcacacatgtgaacagatatggcaaccattacagtattaatcattattattttatacgtctggctgttcacctacaagtgtgtctgggtaccatttgcgttcctggtactctcagaggctggaagaggtcatcagatctccctggaactgggatgataggaggttgtgggctgccaaatgggaattgaaccctggtcctctggaagagcagtctgtgctcttcccacggagcatccagcccctcctgtgatatcagttaaaggagacataaaacgaacattccaatgtttgcattttccttctgtttctaaggtagatactaaagttctccacaatatgtttttagtcagccatctcttatttggttttttaattgcacctaatgggggaatttccaagaattaagtaaattataaatgactgagatttactcttggcagttgaaatgatgatggtatgaactacagtaatgagaaggtaaccttcagtttgttgttttgtttttcttgggctggccttgaactccaaggccgtcctgcttctgctttggttgacgtccaaagttgtcttccaatgtggtaacttagcttacagcgtccagtttgtaggttcactttatttttctaccaacactggggcttgaacctcgtgagtgctggagaggcaagcaacatttccctgagctgcatccccagctgcagccttcaaatgcgatttgaatgccgtttgccttcctgttacaggagtgaacaataagtctgcccaggttctcctgctcttcgtgatcccgggccacttgatcttcctctacacaattcacctgatgaagagtggccacacctctctgactgtagtctttgttgttgtgtacctgtttgctgctgtgctgcaggtaagatggaaacctctgaagatctcctgggctccctcacactgctgagaaactgtcttgatggccatctacagcacacagtatagttactgtttcaaaagtagactgctacagcctggtacacagaacccttgggctgcctgggtttcacagcatctttttggttatcttgttaggtatgacacactgtcttagtcagggtttctattcctgcacaagcatcatgaccaagaagcaggttggggaggaaagggtttactcagcttacacttccatactgctgttcatcaccaaaggaagtcaggactggaactcaagcaggtcaggaagcaggaactgatgcagagaccatggaaggatgttacttactggcttgcttcctctgccttgctcagcttgctttcttataaaacccaagactgccagcccagggatggtcccacccacaacagaccctcccccttgatcgctaattgagaaaatgccccacagctggatctcatgaaggcatttccccaactgaagctcctttctctgtgataactccagcctgtgtcatgttgacacaaaaccagttggtacacataccttcttccaaaagattcttgaagcagggaaaggaagctcattttgggtggtacctggtgttttacttcaccttcaatgttaatattaaatattaaaattaatattaataggctgactgatacttttcttttgggattctgaaggcagcctgccttgctgccttctgtccgctcgtgttgccagtgagaataggtgccatctgactcctgaatctctcgtaagaacttggtttctcacctttatgttcacccgtgtctctgtgaatgtgtgcgggtgcatgcatgttactgcatatatgcgtatgtggagagatcagaggacaacctcgaatgttggggcttgccttccaccctgtttgaggcagtgtgttgtatcacactagctgtcccatgagcctctagcgagtctctggactctgcctcccgtcctcctgcagaagtgctgggatccagatgtgcccctctgcactcagctttctgagtgtcccagaggcacaaacccaggtccttacacccatgggacaggcacttttcccacacggctgtttcttccactgcatgtgacttgggctttaattttccagcagctttaagagctgtgcctcttctctttctcttgttggaagtttttaaattatatgctgatgaactctggtatgggtataagctgtctcttgtttgactctttattagtcaggaactcatgctcttccattctggggaatacgtctttaaatattatttttgatgaattttcttttcttttctttcttgatatataacccaagctggtctcaaaactcaaaagtaacccagacgggcctcaaactagtgacctgctggcctttgcctgcgagtactgggttacagtagtctctactgtgcctggctcttcatgggtcctgtagggttactagacgtcgatcaaacttacttttaaacagcctctgtttcattctctgttttccttttagattactactgctctgtgttgtgtagaaggcttttactttttacactttagaaattttcttttatgtaagcaaacccttacctgtgtgctgataaacaaatctctaatgaaactcattgggtctcacagatagacagacagacagacagacagacagacacacacacacacacacacagagactcaaaagatgaaagcagaaggggtcctggtttggaagaagaaggagtttggaaagggtaataaatggaatgcctacgtgaatataaaaatacattatgtacgtgtgtgaaaatataatgtaagccattattattatgtataattaatatatgccagcaaaaccatttaaaagtgtgctgctataagaaatgtacacattttaaatattaaatagtaccaaaaggttctacgtccctagatctgtttctcagagaccatcattttgaaataccttagctgttttttctgccattattggtaaattttaaagtaatgtgcctaaactttaagtttatgattaattccattttgacgttggctaaaaaataaacaaataatgattgaggacttttggactgttaaaatgtggtcccatattttccacatacttataccacaactttaaaaaaaattgttaaagttggttagtggtggcacgtacctttgatccctgccttctggaggcagaggcaagtggatctctgagttcgagtccagcctggtctacagagcaagttccaggacagccagggctacacagagaaaccctgtctcaaaaaaaaaaaaaaaaaaagaaagaaagagaaaaaaaaaaaaggattgtcagtatgtaattaagcctactttaatgttttcactgtggcttgctctgcctgcatttctttgtgtgtgtgttattttccttgatgttagtaattctttcctttttcacttgggtctcttcccataagccttagtgtttcagctgccccagcttctcaggactgacttcttgtttaaccacagggactggatactccctacagagaggagtgccggagccttcagaggcagatgaaaaggatgcccgaggaggttcttgcgcttggccttcaagggacttgccctggaggaagctggctagggaaggtggacagagaggattccagccaggactcttagggttttatagtctgcttgcttcggctaaacatgaaaccaaaactcggttttactattttgtctttttccctttcactgtgctgatgatagatgtgtgcaggccatcttaacattttggtgctaaaaacatctctgggaggaagaaaggggaagtttctagccttttatcccttttgaattccaaggaagcatttattcacacaacccgtaaacaatgacttgaagtcatttgtcagtgcagcttttaattattttaggcactggttgtttcataagaaaatgagatcattaagaatgctatgaatactttagaacaaaattccatggcaaatttatcattaaagtctcattatataaacctttgccccgagacagagaaacacatttctcttgtagctagagagatggttcagtgggttagagcaggcgctgctcttcagaggacctgaggtccggtctcatccagagactcacaactgcctatcattccagctcctggggacctgacgccctcttctggcctctgtgggaactgtactcacgtgtggaaactcacatgtctactgacttaagaaataaatataaaataatgtttcccttaatgtaaagtgacaacagattctctgtatgtaaagttagaaatgaaaattccaggatttcgtcgggtcgtgtgctagtcactgtcaaaagaaactgatgacaccgtttctgtccctgtgcttctgttagctgcaggatatgagacagattaagaggcaattagagaagaggacgtcttaccttcttattaacaatgtagtcttctgaactctacaatcaaacctcttgtctatcattcttgaagaacacttggatactcttaaagaaaggatcgaagagtatatgttgtagctgctaagttactttcagcaaatatattggtcttagtaacaggtatatgattcttagtaacataatttaaaagacaggtttctttgattcctgttattactacatctcagatttgaaatttatacttacgtacaaattataacatcttctatttcctggcaaattgattttctaaatgactgttctcaacgagccccatacccactttaaacaagcagatgatgcccctcacgcctcccttaggaacgtggcgacatcttagttctcaggcctcctttaagtaaacatcggtggctatagagagtgacaagccaccacatgtggcactgggaccagcactgcttccccactgccgtgccaaaactccatggcattcctcggagtcagtcctctacataatgaagcacagggccccacagcagtgtggcctcacgtggaacctcaggacagccacccacaaagcaagttaattagctttctctcaggaagttatgagttctcgggagtcttgctgtctgtgcacagaaggtgcgcacttcatccgccttgcatggagctgtaatagctgagtagctgatacaccatctcttattaaacgatggacctaaagtttatcctctaacatggccctccaaaggaaagagccaagcagccaagggggctgggtcttcttttgggttttattgccatgaagagacaccacgaccacagcagctcttataaggaaaacatttaactggggctgcttgcagcgttagaggttcagtgcatggtcatggctggaaacatggcagcgtgtagcagacatggtgctgtagaggaagctgagaggtctgcattttgatctgcaggcagcaagacacactggccagacttgagtttataagacctcaaagcccacccccaaagtgacacacttcctccaacaagatcacacctactccagcaaggccctacctagtaattgtgctactcactatgggccaggcgttcacacaggagtgtatggggccattcctattcaaaacaccacagttgtattggccttattagcatggtctcacccacgttcctcattgcttcttattctttgggatttaaaatctaccagatttcaattagaaagactttctttactcttttttagtagtttttttttaagagatagttttatgtagaccaggctgtccttaaacttgatatatagctgaggttggcctcaaactcttgaccctcttgctggcatattctggttgctggtattacaggtgtgtgccccacacctggtgtgtttattctttccatgtgagtggtctccttttgtttcttggttttgactgtcagctttggttgaagaggtcctgtgaagaaaaagatgtcatgccaggaggaagtatatagtttctaactttccttctaattgtaacaatatctaccttgaaactagattggtagaaagcaggtggattgtggaggtttctttttaggagtcttcagttgcttatctgaaatactgtgctcttatggctgttggcatatggtactgtgctcttatggctgttggcatatggtactgtgctcttatggctgttggcatatggtactgtgctcttatggctgttggcatatggtactgtgctcttatggctgttggcatatggtactgtgctcttatgggtgttggtatgtggtactgtggtcttatgattgttggtatatggtactgtggtcttatgggtattggcatatggtactgtgctcttatggctgttggcatatggtactatgctcttatgggtgttggtatatggtactgtggtcttatgggtgttggtatgtagtactgtggtcttatgactgttggtatgtggtatatgtggtcttatgactgttggtatatggttctgtggtcttatgggtgttagtatatggtatgtgtggtcttttggctgttggtatgtggtatgtgtggtcttgtgcctgttggtatgtggtatgtgtggtcttatgctgttggtatgtggtactgtggtcttatgcctgttggtatgtggtgtgtgtggtcttgtggccattggtatatggtgatattatgctgttgttctggtagctaaggggaaagatcttcatagccaagtgcttttctcagttcgtgtttctcagtagagctttaggtgggtgttcctgggttgccacagaaagtcacatggctgcctcttatggaggagcagcactctggacctctggggaggcactggggaagggtccctctcagttttgtcaggccccataaaaatgaagccaaaccggagctttccccagatgttctgcttagggtcttactgtccttactctgaacgcagctggaatttcacatttaacttagaggagagtcacatatacagcacatagtaccataacacacacacacacacacacacacacacacacacacacacacacacctcagctgtgccaaagcacagtattataaagcagaaagtagctgggtacagggtgctcgccggttttgctgtacttgtgaatctaaggcacggggtgttccaggagttctgggctacagagaggccttgtctcctaaagcaacagtgtcaaaggacggtggagcagtcactcagtatgggagctaaaaagacagcttttcccgtgtggtgacaggctggtagagtggtctgtgccgcttagctagagcgttagagaatctcggcttcagggaccagccaagtggctggatgtcacccatggaagttagatgatgggtgtgattcctggaaagagttagttcccgtgctggctactttagaaactaggacttccattggttggtagtttcgtttgttgctaaaaggagctgaaagcagtctagtagctgttcgttcctgtgtctgagaacaggccagtcttctcctaggagtgtggtagggtttgtcttacttcccgcctttggtcctcaccatggagagccctgcagacatccccctacccacacccccgttgcttctccttgacgtggtatatgaagcacttccagtgaaagtgttagcttaacagcttttcctctctgttttctttccttgttgttgaatcatttgtagaaacatctgccgggacggtatccagacaaaagcctttgagacactgaacagtaaccattaagtggctgtgagacaaaaaataacaatcagatctattttacggaaggatttgaaggcttcactagtcggtctctatgtctcagaggcagccagatggcttccctgtagtttagaaattccgttcagcctgaaatgttagccgtgcttttggccggccaaaagaaagtccaaagacactgtactatctttaatgctttatttttattttatgttctttagtgttttgcctgcatgtctgtctgtgtgagggtgtcagaaatcacgggactagagttacaggcaggtatgaactgaccagtgggtgctgggaattgaacccgtgtcctctggaagagactctcttaactgctgaacactcttcccagctcccaccttagtatcttttaattattatttattagctgtaattatttgggctaaggaaattaaatcatgtcttcagggcctgagctgttttatttagtatgtttgcaaaagtaaagaaccagtttttgttgttgttgttgttgacaacttcaaactgttccgttcctcctggagcttgatgccttaataatgcctcagcaccatcagccctggcccagtgaggcgcggctgtcagcgagctgggggcgtatagcctcggtcggcgcaaaactccataggaagattgccctggttcctggctggcactgaagaccttgcgtctgaggcagaggccagagccaggaattgattaggacctggggtttatagagaggagggcacagaggaagacgacatagaacttcatgtcagtggtcttggctgggactagctgctttgtgtcgtcacacaaaaccttcagttaataggctacccccctattgtgggttaggtcttgctagtgctgctaaggtcccctctacttttacagtggatagactggggcgggggggggggcatgtagccagtggatggagggggagatgtagccagtggatggagagagggggatgtagtcagtggatggagagagggggatgtagccagtggatggagaggaaggggtgtagccaatggatggagggggagatgtagccagtggatggagaggaaggggtgtagccagtggatggagaggaaggggtgtagccagtggatggagaggaaggggtgtagccagtggatggagaggaaggggtgtagccagtggatggagaggaaggggtgtagccagtggatggagaggaaggggtgtagccagtggatggagaggggggatgtaggcaggtcaggctctttccagggactgctttattcatcattgcaagctcagctaatacatacttgcaaaatgagtatttagtcatagagattctcattttactgaaagctgtgtcttagtctccgaattctctagacatcttactagtgtgtcttacatgttagtcataaatgatcacattttttttaaagactcactgaatatatctagtattggtaagaggtgaaacatttgacaaggctcttcttgcaaagcggtgacagagcagttggagatcagaaatgcacacatttaacaaactgaagtgtttcttgacgtcacaggcccatgctccacagggacggtaaaaccttgtgccggtgactagggcattacagccacgtagatgttttaacatctgagccatgtgacagtgtttgtgtattggtgtccctaactgttcctctgctcagctcgcctatgcgcctcctctctgagcctttgaaggttcatcttgatcttagtttcagacgggccccggtgtttgttcttcatgctccttaggcaggtcacagttcgttagtgtggaagcatgttgtatgttccattttaaatattccactagccaaggaaaaagtagatgcattcggcaccatagttcctgtccaaatccctggcgttcagaccagtagtcagatccacagaccccgggacagtgaacagtcagatccacagaccctgggtcagtgagcggtcagatccacagaccccgggacagtgagcatgtctgagctgcctcaagatgcaagctgatgcccccaggccttcctagcctctgcctcctcagagctgtccccagtgcctcattaccatttccaggatgctgactagattaattagtgtctcttcctattgtccagagaactagcctcctcttccctccggctgctgaggccttcagtgaacacagaagcagggttctggtttccgacttctgagttatcttccattctgtcctttgtgctctctccttgccactaagcaaacaggcttcttttcagccttcccacctcgtgtcagaaatgttccaaacgttgttactgctgttatgttgtttctgagatagcgcctgcccaagcagtccaagctgggtctaaatttgtaatcctcctgcctcagctttccagaatacggggtcacaggaatgagcaactgtgtactgctatacctgtatttttctttattagctatgatcctcctggctgtgcctctcctcgtgctgggctgtgtgtatctgagtctctctctctggtgtgttctgaatggagccacactgagtatattattcgtagggcttttctctgcacttgtttctgagagttgtgtttcactgttagatcatgcccttgtatgaatattaaagaaattctttacttcttaagttttcttttcatttttctatttcacacatgtatttttttcctatatgtctgtgcaccatgtgtatgcagtgccctcaaggacctgaagagggcgtcagattcccttgaactggaggtacagccacttgtgagctgccatatgggtgctgggacttgaacctgggtcccctggaaaagcatccagtgctcttaaccactgagccatctcttgagcccctagtcactctttttttttttttttttccgttctgagcctttagctgatttctgccctgtgactattgaatctgagttgtttaattgtgggtcttctggattcttgtgcacttttgtctcatggactccctgagaattttttaatactatgggtcacttttcaaaattagggttttcctttttttaaaaatctctttgtgctggggatttgaactctaggcctccagtgcagtaagtcatgctgtctcattgggctacaccccgagccccccaaatcaagttttaaatgcacacagtcaattgtagtcctatgaaagaaaatgtttcctctttccaaaatacatgcatattttagtagtgtttttattgtcgaacagtcatgatttttcaagtataaacataatacacaaaagagaataatagaaaaaaataataactatactgacattaaaagatctgtacagggcatgaatgttgaagattgtgttgtcgttttgaggtgtggttttaggccaccaaggttggcctgcatagttgatcatgaccttgaacccctgatcctcctgcttcttcctcagaagtgtgggggtgggggatgccaggcgcgaccaccatgcctggcttgaagactattattgcactcaggaccttgtgcactcccactgaagctaagcagtcaagagtgaggctgtgttttcctaggttctttaacttaggaaatgtctgcatagtctgagaacaaaggtcagatgcacttaaatgctgcacgtgtgagcgcctgcctggcttgttgacttttgacctttgctctcagattcttcgaatgaatgacacatgcgtgatctgctactactgttgtctgactgatgctcacagcagtgtctgagataggagggggatgttggaaaccactgttacaccttagcagatgggaggagagggagtcagtgaagaaaggaaggaaggaagaaagagaaagctggaaataccagaaatcacagtctatcccaactttaattttaaaaattacatttatttatgtatttatatgttgtgtgtgcgtgcgtgtgtgtgtgtgtgtgtgtgcgtgagtgtgtgtgtgtgtgtgtgtgtgtgtgtgagagagagagagagagagagagagggagagaacgtactttcaagagtcctctccatccaccatataaataagtcatcgagagtgaatgaatgggtgccgtgatgcttgtgtggaggtcacaaggtcctcactttccacccttttgccattgcatgcgccagagcagcactgcagggacactgcagggaccacctgaagatatccaaggccacatggctatctgatgctggattcaggacctaacttgcagttagggaattttctgagggatggttcttttttctctgagtgtagtcagaccaatttcccacctttccctgaggacgcatttacgccttacacagggtggttccttttagtctttgcatcttctgttcgttcgggttattttactttcttttctaggctccacactgttaaaaccagagaggtagggtgtgcagacggctgggtatggtttgtattcagtgatgcagcctgtccaagggctttgggtcttgtcaataactcaggggccagcagcctccacatttcttgtccctctccctttgagacctctgagatttcctgccagctcagtggtacttttaaataacattgttttagctaggtggtggaggcccatgcctataatctcagcacttaaaaggcagaggcaggaggatctctgcgagttcaaagacagcctggtctacagaagtagttccaggttagccaggactacacaaaaagaccctgtctcaaaaataaaacaacaacaaaaagacattgttttccaaaagtagctaagcatttgaagttgttctcaatgaatgagttgtttgtaatgctctggtcaagtctcattgctcatttggaagggctgtctgtctgtttaaggcttggacctggacctgccatgtatttaatctataggcagaaatctttcttttctgtctgctttcagtctctgttcaacagacccagcctgggatggagagagcagtgtaggctttggagttccacagttggactttattctcggtggttgtctgaacagacaagtcacatagcctttcctttctccattcaatttcccctctgcagataaagatgacaatgcccaccacggtcctgtcacgcctcagcagcactcatagaaaacctaatcaagacatgtcagatcagaaagacatcttatctaaatatcagaggagactgaattcctgcccaatgataatcctgagttaccccctgccatttaaatactagagaccatctagtatttatatggtctaatcagtgggtgatttttagtctggagactgaggctccagagggcatgaattcaacctttgcaaagctctgagttagcaaagactgtcctcatttctacttctgaggtttatctgtgtcatatcgctaagtgttcctctgcctaagcagtcaccgctcttcacacaatgtacaagacggctgctggcaaccgcagctctaaaggaatgctaatgcacgcgaaatgttgatccgagccccgaggaggagcagagagaaaggcagtagcggccaaagcaaatatgtattcttgtgctcacatatttatttaaattctaggcaatgcatttataacttgcataattagccagggctacaaagttgccttttagaaggcatatttacccagagaagttatgcatatttcataaagagcaggcgatgttgaaactcagtgtacccttggcttggtatctgctgtggaaagcactcgttccttagtgaatgatttcattttgaggcaaaacatattacattaataaggctctgatattcaccatgatttttgtaatttacacccagagatctgaaataagcactaataaattttgcctacctgaaaaaaaaatttttttaaaaatgtaaacctgtttaaagtcatctttaaaaagaaatcatgtaagaagctgacttgattctgtgacctgttgtgcagagcaaatggaataagaatctggaagagaaagcacagagaagaggtcactgtatatgtgtgaccttgtgtgacagaggctattccctttgtggtttacagctagaacactctgcaaaggcaagtccactcgttctaaggaaccaaggcacggaggaagtgtcacagcactcactcgccggtgttagagacccatgctagaaaccggtgctcacttctgttcccattcagcatctgagctataggtgccgacagtggtggaggctgtggagcaattactgtgaccttggcactggcgaagcctttgatggcatctcgttcagtgctgctgtgccctgtgggttggtgactgttgctcattttagaggttaaggtaaggaagacttggggacatcttctgtggacagcagcagttaccaccgcggagcctctgccacgagactgtcttcacatagtgcttggaatgttcaagagtctacaagacatgcacactgcctcttcagggtgggtgcctcttcagttagtggggtcccactgcctcagagctcatagctaaccacatatccgccactcagcttcagcaaccctgaagttacctgaagtggatatttcagaatgataaataaaagcacacatgtaagtgccacccacacaccaatcccaccccctctccattctgctctggtgttgtcggcgccctgacctgtcatctgtccttgctttgcctgtgctgatgtctgaataccgtcgtattttcaatctttgggagctattgaaatgttgtgctttgcagggttgcagctgtttaccttcaaccttaggcttctgacacactgtcatacaggcctgtcttttgtcgttcatggtatactctgtctcgtgttcacatgtctggcctgagacttagcgccacccttctctctcaggtcatgtccagctcttggctttcagaacatgaaagatgcagtgaggggtcttgcttccctctcagtacgtgctgagaagaatttctctggcttcccacaaggaccctgaggttttgctcttgatcctgtggggatacccagggacctcagagcagaagagcccccattccttagctctgaaaagtttctccctctatcctggtgtttcagggaatgagaagagagtagaacattgtttctgcatgggatcttcatataacacatacagaccattgtcctttgtgttggatctgcatatgacatgtacaggccattgtcctctgcatgggatttgcatatgacatgtacaaacagttgtcctctacacgggatctacatatgacacatacagacagttgtcctctgcatgggatctgcatatgacacatacagactgttgtcctctgcctgagatctgcatatgacatgtactgacagttgtcttccaggagagccagccagtgtccactgatggagggttcctctctgctgagagacaggactgagagaacttgggctttatgtctgtatgaatctgagccttattcaacctgtaagctgggtgtttgtttcttatcaggggaaaaaaaacctttgataaacacaaaaccactattaataccctcaaattttttctttcattttcttcttctcctcctcctccttctttgtatgtgtgtgtgtgtgtgtttcaagacaggctttctctgcatggcgatgggtatcttgaagctctctgtagaccaggctggccttgaactcagagatctgcctgcctctgcctctgcctcatcagctgtgggatcaaaggtgtgtgttgtcaccactgcccagctactctcaatttctattacactcatttttaaagattgtttttattatgcacattaattaaagcctcttaagcattcttctgtccagtagaactgatacaacaaactaagacactctnnnnnnnnnnnnnnnnnnnnnnnnnntgtcacctttgccctaaagatgctcgccacacaagcctggcaaccttccatgatcctgggaaccaacttgtcctctgacccctgtgcatgtgccatgacacacatctcccccagtaaatcaggggcacacataaaaattttgattatggctgggcgtggtgacccacacccttaatcctagcactcaggaggcagaggccagcggatttctgagttccaggccagcctggtctacaaagtgagttccaggacagccagggctatgcagagaaaccctgtctccaaaacaaaacaaaacaaatcaaaattttttattacattttcttgttctatgtgtttacatgtacgtattcatgtttgtgtgaatgcatctgtgtgtccatatgtgcagaggcctgaggaccaccttggatgtcattctcctacctgaccccaacccctctgtattgaaacttggtctctctctcactggcctagagctagctaagcactggccacatagactctgggtggccagggagccccagagatcttcctattttgctccccagtgctgtgatgctgagcgtgtacaccacacctggcctttaacatgggttctggattgaacgtaggccttcatgcttgggagacaaatgctccacaggcaggacctctcctcaaccacccgaaagctcactccaactgagtagctactggcttttatctcttcctctttttctctttagatttacccctgccttcccatttctccttcctcctcctgctcttcctcccgctcctcctcctgctgctgctgctcctcctcctcctcctattcctcctcctgctcctcctcctgctcctcctgctcctcctcctcctcctcctgctcctgctgctcctcctcctgctcctgctcctcctcctcctcctcctgctgctgctgctgctcctcctcctgctcctcctcnnnnnnnnnnnnnnnnnnnnctgctcctcctcctgctcctcctcctcctcctgctcctgctcctcctcctgctgctcctgctcctcctgctcctcctcctcctcctgctcgctcctcctgctcctcttcccgctcccattcatttaattttcttcttccagtgttccctctttgtcctcttcgaggacctccccggccaccttggcaaaggttttcattgcttagtttccccttctgttctctgggcatcttccatgcctgtctttctccttgtatttgataaaaattcatcttcttttgtgttgtagacattttacactcagatggaactgggtggcccagggccaccctgagtgtggtcaacagtggccctgccttgcccagcactgatgctctgagctgacaatcttgggccgttttcttaaactctgtctgtttagttctctcctgggccaatgacggatagtagcccaaataaatatggtctgggagttaacatcagctcatgcacggtggacctctttggacgccacgtggtcccattacagaccatctaaaagacgatgtttgctatcattacagtttacattttatttttcccatgacatgagcatgggatggaacacacaggttaaaacaccatttcatgctctcctcgtgggaaaagcccagatgatttgtgtgccttgtcagtgagtccaagcatcttgtttcttggctcttgcgtttcttttctctcttgctgggttcttcttgtgaactgtaggaattctcagtagtcccccagactattctgaccactaactcttcacctgttgaatttgaactgcagaagtattcactgcgacttaacactgttcactcaatataggtttcatttataaattcatctcccaaatcaagatcagatattctcttatgaagtttttttaaatctacattttacctagaatatctgttgaggtgtaggggtaaggctggcagttcctgtccctttgcccctttttttgagaggtggtagcatgtgagcaagtccagcctggcctggaactcagggttctcttgcctcagcctcctgcacactacagtagccatcttctttttgtcctatgttcttctggataggtgcacacctttttctgtgagttgccagattacaaggtaacaaattcttaaatctctgtgggttgcctctctgggacaactgcatagctatttaaatctctctggtgggatttttccaagtgaatcttaggggtaataaaacaaggactcagaagcagactcaacaggagataagggtggtgtggagttgtgttctgataaaactttatttatagatgtaggtgacaggttgatgatgtcatgaggtgtcactaccgatgtctgttttggaccagggcttcatatacggtttccatttgtgatctcttttctcctaagaaattgttatgtgaccatggtatatggctctataaaacaagggtatatacatagtacacttatattaatagatagatcataacaaaatttattttaaaacaattatttgataaacttaaaattttttaccattaattataggtgaaagggccagcaatatgccttagccggtaaaggagcttgtcttgaaacctgacagcccaagtttgctccccaggaccctcataaaggtagaataagaccatcagctctccaaaactgtgacctccatgtgcacagtggcacatgccacctcccataacatgcatgaacatgcacatgcatacacaataactagtcttattaagaagccagctctcgcacttgggaggcagaggcaggcggatttctgcgttcaaggccagcctggtctacagagtgagttccaggacagccagggctatacggagaaaccctgtcttgaaaaacaaaaaaacaagaaaacaaacaaacaaaaaaagccagttctcatctcataccaatgacatggccatgcttggtcatgcttggtcatgcttggtcatgtgtgagcgaggaaatcttggctcactgtttggttctgcaggatgtcaagtgtcttcaatatctcccagaattgatcactattttggttttgtaaacatcaatgccaaaataccactttgaatatatgcacaaagtggaaggaatatgcttagacccatctcagaaattctgtcctaattgcaacctaaattcatctcacaagcacacccccacctccccacacccatacacattaatgaaactcaagtgtgcaactcaaaacagtaattttaaaaatcaaatattataataatacagtataaagataacttggtatttaaatgttgaggaataacagtacgaaaggttgtctttatgtccatattaaaacattgtgtttctataagagcagagaagtgcacataaaataagaaaaaatatcacagacacacacacacatacatgcacacagacataatgttatacaacagtcgcaaattcgagctaaagtgtttgaagcaacattcactggcgtcatagggagagacggcctgcactgtgcacggtgcgtgtgtcttacgtgcagaaccaaggctgcagtgatgccacctgacacacaatggaacacagaaatgccttgaagtctttatgcatttgatttgaattaactttctgtaattgtatttggaagcctttccctgtctccaggttttttgggatctctatatttagttgtataacccacttagggctgagacacacagttgaggaagctagattctaggctggactctcacccattttatatcatgccaggaatgagtaaattacacgtgtatcacatgtaactccagaattatacaaatacacttagcatgttacagtagtatcatagaatgagctagccctattctcttcaaagagttacttctgtctgcatcaatctctcagccaacagatgtctttccattgtatgctagagttttaaaacgttcccttttaatctcttcagttccccattgatcatctaaaagatgttcctcgctttttatatgtgtgtgtgctcacatgccacagtgtgtgtctggaagtcagaggacagctttgtagcctggctttctccttccacctttccctggattctaaggattgaattcaggtagtcaggcctgcaggggcaaacattgttcccactgagccaccacgagcaccaccgggggcaccgtctgctgtgtgggatttaacacttgccttctttactttccagaattaccatgatgcaggcatttgtttgctgaaagttttttatgtgtcttaaaggtagtctgtctgtctgactaactaggttaattctaaaatccctgcttgtttttggcttattgtggaagtattctcttttatttttcttttcatggattgacattttcaactctgaggggttcccattagttctcttttctgtcttttctgaagtcttcattcaagtccccaatttttttttttcatttctttatgttgctggtctcgggcctcttgcatcttaccaggttgtcttaggaatgctgctgtgatctcttttctgcacctcataggttttcttcgaattgagagcatttctggagcattacgttgttctttgtggttcatgtttcctccgcattcctctgtcttatgttggtggctggtgtgtgtgtgtttgtcagtcctgaccccatgaaggaccttctgtaggaaaggctgtttgtgtgtaggtggggatgtcagtcaggttggatacttggggttggttccaaagaccacaacagcacgtcttcgtgcattttctccctctcactgatgtctgcatggctgcgagtgagcaccttcaccgtctagactgcagcctgaaggaactgtatgaccttgcggtggtggaagtgagtgtccagaggtctcttcagcttccacagtctagccgcagtggtgttttggcgacggccgctgctgcagccttggtgtgcatggaatgtggagagggtgagctttaggtccctcagggcaagtgtaggagagaccaaggaacaaccccagtagccacaggatttccacaaggagatatttcctgggactctcaggtttctgtgtaagatgcctgcagctgtggcttggctgtaatggatacaaggcaggttgggtcagaagagcacaggcttggaagggtttggaaacaaaggagaggctctattggtcctcctgcatggctgttaaattgccgctggtgttggtgggctgaggaggaggctttcctgattcctttgagaccagcacagatggactctgggtagtagcaacaacagcctctgatcccaaggctacacaatgccaaaggagactctcccaccaagtgagccacacactggcccaaggcttctggtgggccaggcatttggctgctggctagggcagcgtctagcagtggctggtatggtcaattttctgagtttgggggagatacaaggtaagtgcctcccgtggagcagaggctttgcttttagaccagctggctccagggactggctccaaagcccgtggggtctgagtctggactgctgggctactgtccagggtgctggcattttgccactttgagcttttaaggctctgtcgtattccttttccttcaaataagtgatggacacccagattcataagaaaccttcccaaagaacaaattaagaatcaaatccaaacctttcagctttgagacagatcttcataaagcaggccttgaactcagatcttcatagagcaggccttgaactcagatcttcatagagcaggccttgaactccggctggttttgagtcatggtatcctctcggtgttccacaagctggaatcaccagccaagttcctaagtctacaacacagacggtcaggatcctaacagtctctgcttcctccactctcaaaacagtctgagttagttctagctgatcccaaggcagcctctgccagagaaacaggaaggaagtgttggcctcacccaaggggcagcagggcttggtgtgtgatgtctctgacaggagtccagggcatctcataagtgcccctaggagcttgcctttgttgtggacaaccaccccctttctggttaaggtgtcagagccaaaatgatagcacttggcctaatgtaatgcatggcagagattggtcctagatgtgttcaccagcagtgaggtgaagggaggtgcagcctatgagaagtggggcccattgagcttctcaggagtccatgagatgtgcgttatacagagtgcgttcctattaattagctgcctcttgcaagtgtggttcttgacctggacacaagccgttctttccagaaacaagcagttgaagggccgggagatacaggcggcaagcatcatctctggtcatgtcttgcaggtgttcaccctgctgtggatcgccgactggatggtccatcgcttctggagaaaaggaaaggacccagacagtttctccatcccgtacctcacggcgctgggcgatctgcttgggactgctctgctggccttaagcttccattttctctggctcattggagaccgagatggagacgttggagactaatgggacctagaagctgtcgtggggtcacacaggggaaggatacaggcagccattgctgcccctccccaaagctcttcatctgtcctgtaacttatgccagggtagtctgcagttcaccctgactccgtaaatggccttaatgtactttttaaggaatttgtgccgaaaccacaatgaatggtatttgtgctgctttttgtagaataaataatttgacacagacatagatacaagctcacattctaaagttaattaggaaagaatttaggatgtttacaatgagttaattttgaaaccacagacctagcagaaatagactttattattaagttataatgcacagttagaggcaagggagtgttagccttgtcttacagctgtgtcacactacagagtgccatgactgatgtgacgggggccagctgaacgtccctaagtgttcattaggccttcctccctgggagctaaggttaccagttacttaactcacaatacccctcccactgaacataacaaccagctcacttttacccatatctaaaactgccctgcgccaacgttcatctctgctcagcgagttctcaacagctaaccctttagtagatttgtttattctttcgtggagacagggcttgctatgttgtccctgtagtcttttcacttgcagtcccccttgctttggctcccttctcctggtgctaaaagcactgagctgtctcgctcatcctgtgttgaaaaaggttgatccgatttagaaaaccgtgattaaagcagaaggtgtgctgagctgtgtttgtgggcccaagatggagtgcgtgcgtgtgcgcatgtgtgagggacaggcccgagaaagacagagacaaagtagtttctttctcaaaaatgagtaccatttaatataatgcagacctaggatctgggacgtgcaggtggtcctgttgccctttaaggcgccctacctgttggatgtcccaagttggcggcttacctcagcatctactgcatcagggctccatctcctgggaccgcctcatggccgtggctgcgctcctcagatgtctttctgaacgtaagcacctaacccctggctattcagtagtaagcactttaaaattgcccggcaatcgttcaaggccgttaaatatttaataatttaaactgctgagggcatggactccgcatgacgttgattgtcatggcgaggttgtgctggtgaagaactagcaggtagcttgtaaatatactgaggaagtttctcactaaatctttatggaggctgtggtttagagttgtatatttttgcttatttttaaacttcgttcaattctcctgccttataatcaaacatttaaggcatagaacggaatgaattacaggatctctcctttggagagttagtgtcacggagtgaccattctgacaaaataagcataaagtttaagttgatgaataagtatttagttgcaaagattattttatttaaaaattaatgaatactacctttcattttattataaaagcatttgtgaatttgggttttgcatttggctgtacattcttttggtttttgttttgttttgttttgttttgttttgttttgttttgtttttgagacagagtcttgcccaggcttaaacttcagctccacctgccttagcctgttgggattcattttctttaactcacaaagagtatgcagagtaagccccagtgttagcctggttggcagtgttaggcatattcctaagcacgggaagatgtgtgagctaccgtgtgtggtgctgacagcctcgcctggcaggtgggttgaatggagactcctgtctgtgttttatcaagggggaaatacagaggagtgacatttgtaagatttcacagctatgcagggaacagactcttcacatgtgtgtcccacccccagatgtgcaaagggtctacctagttagctgagaaaaagcccaatcaagtgttactagtcttttagattggcagcagggaaacctccacctagtgtggaccaactgtgaactctccccgttcctaaggtcagagagactgtatatgaacatttaccttataaaatattttttattttataatgaagacctttagactaaagaacaatgcctcgattcttcaggcctccaagagccagccctcttcctagatctgctgtgtcaggcagtagaggctttatcggaacagcaaaatatctaagacacatgtagtgggcagaaatagactcggactgaatgcattgtgaagggatatgcactgttaattacagatctttgaaagtctctgtgtaagtatgtaagttttatttatccataaaaaggtaaatgaataatatttttataccacacaaaccctgctttccaaaactggtttcccactaacttaccaggcacattatacacacagccaaaaaagatcatatttttttaattcttgaccatccacttattttgaaatttccaaacaaagtttcttagaagctagtaagatagaaacacgcggaggcatgtcttatggagatgtcagaaagtgttgcatcagagattgtctgtgatgtagccaaatgcatcttttaaacgtctgtcagtggtggggtgtgcctaccttccctgtttctgaagtatagtttacccactagtagtgggatctggcaccttgggattgctgtaaacccaaatcaaaataaaaattgagaagcattttcttgtgccattgtggtttttttcttaattactctgtcagctacagaccaggtaccatgtttggaaatcccccagaagggtccaggtagcctgtgttcatggaacatggtaactgggctctgatgacagctattcctgcagcccactgctccactgtgagagcttctgccttcccgccatcgtcattggacacagagtattgggtccatcagtccgtcccagacagagcctggctctcacaaaacatagctcacattctgccttctgttcctctctgtctctgactcttgtctcccctctctcccctcccctcagccctgaaccatggagtatggcctaagaaggacatatgcccactctgtcctgccttacatcaaatgccttcagtggcaggcagcttcatgtactgctgacaactgtcaccacttatccttgggacagtgacctgtcctcaccagttctataaagcacattcatccaggtcaccaacagtctgtaattgtgccaaatctagtggttaattcccaccaaaatgagtcacattaaaaacatcactatacaacacagtgggaggttgtcatcggagtgcatggaacagctggacatctgtcctaactctgctccagggatctgcccaggttctcttccctataccctgaggcccccttccttatttcccaggtttgttctttctcagtgtctcagtgttgggatgctcatctctgtctcctcagagtctactgtattctaggcctcccgcaacattgttacatggtctatgctaattcctagtttacctactccccaacccccaacagtcccatcttctcccatcctgtgagttcccagtctgctctttccaatgccagtggatggtgccgctcttaaatgactgacagctgtttgaacaacattgtcaccacagtagctacagagtactcattaaaggctgactcacctgtgaagaacttctgtaagtcagtgtcttagttagggttttactcctgttaacagacaccgtgaccaaggcaagtcttataaaaaaaaacaacatttaattggggctggcttacaggttcagaggttcagtccattatcatcaaggcaggagcatggcgcatccaggcaggcatggtgcaggagaagctgagagttctacatcttcatccaaaggctgccagtggaagactgaacttccaggcaactagagtgatacacccattccaaccaggtcacacctattgcaacaaggccacaccttcagttggtgccactccctggtccaaggatatacaaaccatcacagtcaggaaccaatgaagcagcctgtggagggatggctcagtgacagaaacaatcgatgctcagtccttaagatcaaaacaaggtcagggaaggggagctggtggtgtgatcccagccctcgggaggtggaggcaggaggatcagggttgcaggtcattcctcaacaacaagtcaagtttgagatacatgagcccctgactcgagaaacaaaacgtgaagtgaagtgatgcttcatactgtatattacctattagactgacaaaaactcaaaactgaagaaaacgtgctcttggcaaggctgtagggaggtggacagatctgatggtgataaaaccaggtagtaacagtccacagtggggactctggccacttctgactggttagaagccagtatttatggggacaatggatgctggatgaaagtagttttgaatgaatgatcttaaggaaatgcaaggccaaaaaaaaaaaaaaaatctattcggtttcaacaaagcaggttctgaagagccatggcagtgagtgttaacaacagggagtgatgggcctttctctggaaagtaggaaattagccagaaacagtgcacacacacacacacacacacacacacacacacacacatgatggtccctgggctccactcaggctagactgaccggtaaacagaattgctacttagaatcagtatttctcagaaaccttgcaaagggggtttctgcttgccaggaaaagccattactttcttatctgccctagctccggaaaagagtctagttctctattaactcaaacaagccttcagtagatcaaagcccaacactggttcccagataaactcgcctacctcctgctccagcgtaacccctcataactgacacacttcttccaccacttctcatctctctgaccccagagagctagccttggcaaattgaacttttccttctccacccatgtgaactctccttcgttgggttcacagggccctcacgtctcttttctccccattgcattacagcttcagggataacccactccaaggagtttgttaaacagtttcaaatgaggacagggtcctggcaaagaatgtttacccagaatcccccatgtcctaggggtccctcatacacaaccaactcagaatattcccaaacacatagcaacctacatcaaggcttgtaacagatgagaaatttgtttgcaaacggctgcgctgagtgctccaagatactaagggttaagaaaagacttgggatagaatagaaagtttcccagtgtatgggaccaagcaaggtaccagacaaaaagaaaaaaaaaaccatcatagagagggaacaaagagcgagtggtacatggaacagagaagacctgcatgtgtatacttcttcagatccaaatgactgttggggttgggtcacccccaaagcctcctgcatgctgtgaaaatcatctagacacttttcaacaaacctctgattcaggaaggtgctatccttgagactaacatggcctcaggtgggctgtagccgcgtgtgggggacaggtccagtgtctcagaaaatcggtggccagcaaagccaccctgggccagtagcttctgggtccttgtgaattcaaagaatgaaattcactggctgcagaagggtgagtttcaggaggcagacttcttgtaagtttataggcaggcgccttaagatggcagagacactgtatagcaagtgtgtccagccttggcatgctacagagctttcagcccaggggcttttgacagaaactggagtgagctgtgcagggtgggacagatgaggactgtccctcacagtactcaaccgtctcatcctcagtcagaggtgctgttagggaagtcatgggacctttaggagccagagcctcgctggaggaagtgtgccactgggagtggtctttgaagggttataactttgccccgcttcctgttcttccccagtggagataacaatgtgaccaggcagcttcctgtacctgccgccataccacaaccataatacctttatggactctgtctattcctctggaatcacaagctgaaacaacctttctttcttatgttgctttggtcgggatattttaccagaatataacagaaaagtaccctttagtgaggggtgggcggggtcctccagtcggcccacccacgacatgttcaggtgcctctccgttttcatcctatccttacagacggtttccaggcggtgtgcttgctcatttgggggatgagagatgacaaaccagatctttctagtattcctggcctcccaagggcagaagtgtcgagaacaagaaccaggtgataagactcttacaacgtaaagcatttataaccgctcacttccaggagccctgccagtcttcatctctgttctcaccatgagggacttcatggcatggaagataccggccccctcacctcagctgacagtcgtctgcagcaggcatcacctgggagcccagagacgtccccaaagcagccaggctctgccacagtgcccagggctatcctcacaggcctgcctcctctaaacctggggctgagtttggaaaatcaactttagacatttttggtttgtctgtttgtttgtttgtttttcatggtcatacgttcattctgcagagtgctggttccacacagacaatttctctctagtatatcatgcgctttggccaaaatcacctttgagggtcagtttcctccttttaaaaagcagttgtgagatgttacttacagatttgatgaactttaggagtagcatacacataaggctgaactgatattaaggacggttctggtacagttaaaatacatttttttccccactttggtgcaaagtcataggtgtcgcccttggctttgaaacttgctctcatctccaacagaacagcacaaacctggattgctgtttatgtgtttatttttattttacacatgtgagtgttttgcctgtacatatgtacgtaaactacatgcatgcaggactcatagaggccaggaggcagcgttagctcctctaacgtgtgggcgctgggaaccaaacacaggtcctctgcaaaagcagcaagtggtgtttaagtggggattcatctttccagatgtgtgtgtatgtatgtgtgcatgcatgtatgcatgcttatttcaattttattttatttttctgggtaggatatttaatcccaaagactcaggcgtttttctcatctataaaatgcagtagcagtgcctgcctcataagacagccaagacattcaaacaagaaaaagcccagcaaacgggagagaggtgggatgagccggagaaatatcactttctccaaatgacttattcaagtttgaataacaacagcacaggatccagaataacagcatctgaacttccacaggaaaagcgattggaaagtgtctttcctgtagggctcagaaaaataggttttgtgacctgggaaatcgaagctcagagagccccacccgcaggggtctgggctctaactccctagcagatgccaagaggcctggtcttcggttgacttatgtgatagattatttttaaaccataagttgaaagaatcaggaaccagaggcagggaaagaccaaaccaaaccaaacaaaaaccttttcagctggaaaaaaaattgcagatattactttatctgggaagcgtaattacccgccgctatagacaagtctcaaacagtgtgctcggcagctgccccttcagagaaaagaaagacaagactgggccagctttgtattttcgaggacagaccagtttgacagaaggagactggcaaatgctgaaatcatatctttctcatgaatctgaagaaattatagcttttacaataggtatttttagaaagccccgccaccgccatgtataaagccatctatagctagaagtacccacctcaacctatattttttaaatatatgatcctaggggcctccaggccttcggggcactgcagaacctatgcctctttgacagcagcctctctcagaataggaatgggagcagacttgaaaagtcaaactgtgtaatgtgcaggggttggggatatgcctgtaacctggccctctgaagaggtgggcaggggaatttcaagttaaaagccatcctgggctatgtcaacagtccaaggtcaggatgggctgcacagtgtcaaaaaaataaaaaaaagtagggcctagagcgatggcacagtggttaggagcactgtctgcttttccagaggattgggcttgcatttccagactccacatccagtttcagggatccgatgccctcttctggccttgatgggtacttcagggatgggatgcacaaacatctgtacagacaaaacacccatacacataaaaataaaataaaataaaataaaataaaataaaatcaagacaacaaaaagtagaacaaatagtaaaacagtcaagtcaaacatctttgaattcgaatagaggtgttatgggatgagaagggaggtgttatgggatgagaagggaggtgttatgggatgagaagggaggtgttatgggatgagaagagaggtgttatgggatgagaaggggaagcaaatgtgaggcaaggcaaagtccacaaaagaactcagtagagttctctcagttggtagtggtgtgcctagcatgcaggaggcctgggtttgtctccagcatggcccgagtacccagagcttgggaggcaaaggcaggaggatcagaagttggaggtcatccttggcctcataaagggcagcctaggctatatgagatcctgtcaaaaatacaacagaaacaaaaccaaacaaaaccaaaggacgtcagcagataagaaccccaagaaaggactaggtgagttgaagccctccttctcattcttggaaatttccagaagtatctcatttttagtgtgtgttttcatgtgtgttcatatgtatgtgtttaggtgcacatgcttatgtgcacacatgtggatgcacaggtagacatcaggcgtctcacctctacctctctccactttatttcttgatgcagcaactctcatgagagttcactgactgcctagactggttgcccgtaagatcttgggtgccatcttctctgtcctcctagtcctagagtgacaggcatgtgccaccacacttggcttttatgtgggtgctaggaatcctaacagtttctcatacttccatggcaaacatttacccactgagccatctctgcagcccccagaaatatggggaattcttaccataggtgggatgaagcttgtgttcttcaagacaggatggggtgaaaccctgtgactccacacagaaggcttgaagccaggtgtgggtcatgaggttccctttcctacacagccacatcgtcttcaacacgcaacctccaaactcagcacagagggaaaacacccatctcccccagaacactcataataatctatagtcttttcacagaaaaccctgataccatggagagagacagcatcataacacacaacaggaggtggtttcacattggccattagtcaagtgtcccatgtggtacaggttgacagtgtggatcctgccacactggaatcaaacagttaactgtgtgcatggctgatggaggaggccagggttctcactgctgaggtgggaggttacagaaagacagagaggctggagtgacccaatggagtagagaaaggaactgtgatgtccaggaagcaggcatgggaatgacttgtcactttcatccaaggcccaatttaactgcaaggaatgctggggagcatggtctttctgtctgcccaagaagaaggaaaggaggcaaaacttgactgacctgaaccatttatcttcactcaagacatttgacttgatgttcaagaatgctgtggtctagaaggctgaacggcttgagagacttcaggaaactcaaagccatatagctgagagactcagcaagagttgctgttcctagctactcatagtggaaaatctaagtgagtcactgccatgatagcagtgacctcttccagcaccaggtcctgagggaccctaaagactttttccagtcctacagcctccttacagcttcccctcctgtctggggtcaagac

SEQ ID NO: 3348 - DNA, 1757 bp, Mus musculus
tggaggaggttttgtagattggactttaaatttaaatacaattcaatctgacaagtttttgaacttacttttaagcatggtgccagtcatttaccagaaaaatcaggaagacaggcataaaaaagtaaatggcatctggcaggacgggctgtcgggtgcagcacagaccttcagcaagagatcagagccacatctggactaccacgagttctcagagcaagccttccacagcagcagcagtgggcacactccagccagctgcagccccaagtacgatgactatgctggctataactactgtgacgggagggaggcttcggaaaccaccgccatgttacaggacgaagatctgtccagcgagggcgatgatgttattgtggaaacaagccagaggattccaaaggagtccagtggggtcatggctctgcagatattggtgccattcttgctggctgggtttggaacggtttctgctggcatggttttggacatagtgcagcactgggaggtgttcaaaaatgtgacagaagtcttcattttggtccccgcgcttcttggtcttaaaggaaacttggaaatgacgctggcttctcgattatctactgcagtaaatgttgggaagatggactcacccattgagaagtggaatctaatcattggcaacttggctttaaagcaggttcaggccacagtggttggctttttagcagctgtggcagccatcatactgggctggattccagaagggaagtattacctcagccattccatacttctgtgctccagcagtgtggcaacggccttcatcgcatctctactgcagggaataataatggttggtgttatcgttggctccaagaagactggcataaaccctgacaacgtggccacacccattgctgctagttttggtgatctgataactctcgccatattagcttggataagtcagggtttgtactcctgtcttgctgccaagcacccagctaccaggacagtgctccactcaggctgggagcctgtcataacagccatggttataagcagcatcgggggccttattctggacacaactgtatctgacccaaacttggttgggattgttgtttacacgccagttatcaacgggatcggtggcaatttggtggccattcaggctagcaggatttctacctacctccatttacatagcatccccggagaactacctgaggagcccaaaggctgttcctacccatttaggacattttttggttcaggagtgaacaataagtctgcccaggttctcctgctcttcgtgatcccgggccacttgatcttcctctacacaattcacctgatgaagagtggccacacctctctgactgtagtctttgttgttgtgtacctgtttgctgctgtgctgcaggtgttcaccctgctgtggatcgccgactggatggtccatcgcttctggagaaaaggaaaggacccagacagtttctccatcccgtacctcacggcgctgggcgatctgcttgggactgctctgctggccttaagcttccattttctctggctcattggagaccgagatggagacgttggagactaatgggacctagaagctgtcgtggggtcacacaggggaaggatacaggcagccattgctgcccctccccaaagctcttcatctgtcctgtaacttatgccagggtagtctgcagttcaccctgactccgtaaatggccttaatgtactttttaaggaatttgtgc

SEQ ID NO: 3349 - protein, 528 aa, Mus musculus
GGGFVDWTLNLNTIQSDKFLNLLLSMVPVIYQKNQEDRHKKVNGIWQDGLSGAAQTFSKRSEPHLDYHEFSEQAFHSSSSGHTPASCSPKYDDYAGYNYCDGREASETTAMLQDEDLSSEGDDVIVETSQRIPKESSGVMALQILVPFLLAGFGTVSAGMVLDIVQHWEVFKNVTEVFILVPALLGLKGNLEMTLASRLSTAVNVGKMDSPIEKWNLIIGNLALKQVQATVVGFLAAVAAIILGWIPEGKYYLSHSILLCSSSVATAFIASLLQGIIMVGVIVGSKKTGINPDNVATPIAASFGDLITLAILAWISQGSCLAAKHPATRTVLHSGWEPVITAMVISSIGGLILDTTVSDPNLVGIVVYTPVINGIGGNLVAIQASRISTYLHLHSIPGELPEEPKGCSYPFRTFFGSGVNNKSAQVLLLFVIPGHLIFLYTIHLMKSGHTSLTVVFVVVYLFAAVLQVFTLLWIADWMVHRFWRKGKDPDSFSIPYLTALGDLLGTALLALSFHFLWLIGDRDGDVGD

SEQ ID NO: 3350 - DNA, 146540 bp, Homo sapiens
ccatctgtcgttgtcttgggacccagtctgaagaagcagcaactgcctaggacatgccattctcatgacagagggagcaaagagacatagctgaattgtttctgtttgtaagtgttgctgctgctcttattctgatggccaaagagagtcccatggccaaacctgatgctaatggagatgaggaagtagaatgctcctacagtccttgcaaataacatggcaacaggtagagacaagaatcctcctgtaggaggggaccaataacggggagtaataataacatccatcacagtattaatcacatcgaagcagtcttgtatatgcacaatttgaagaacaataataaacactaggtatccaccaccaagcttaaaaaatataaccaatacctttggaacctcctgggtgcttttgtatcacttcaccaaatgtaagcactcttgaaatgtgtgtttgtcatatccttattcttatattccattgtatagatatgccacaatttatcctttctcatggattaattccatttttttttttgctagtatggataatgctaccaagaacattctttcatgtgtcttccggtgtacagtgtgaatttctttagggcagggatttaaggatggaaatgctggactgtggggcacatgcctctcagttttggtagataatgccaaattgttttccaaagtgcttttggcagtttatacttgcacaagtagggctgtatgcattaccactgcttacatccttgttcacacttgaaagcctggtaatatcaaatgattcctttttgaatgtattgggaggtgcttctcaaagtaacacaaatcctttgggataccatttaaagtacagactttgattcaggaggttgagttgggatgggagctgactgaggtcctgcatttcttagtctcccagttgatgccatgccactggacccaagaccacactttgataacaagaatctaaggcactaaatacagtcatgcatcacttaatgaagggcttaatgatggggataaattctgagaaatgtgttgttagatgcatttcatcattgcgtatcatagagtatgctaacacaaacctagatggtagagcctaccacacgccaaggctgtgtggtatggcctatcgctcctaggctacagtacagtaacgtgttatacaggtttgtatagcacattactctactgaatattataggcagttgttacacaatggtaagtatttgtgtatctaaaaatagaaaacgtatagtaaaaacacagtataaaaaataaaaaatgatacacctgtatagggcatttaccatgaatggagttttcagtactggaagttgctctgggtaagtcagtaagtgaatggtgagtgaatgttaagggctaggacattactgtgcactactgcagactttataaacacacttaggctacacaaaatgtacaaaaatatttttctttgttaaactatagcttactgcaacttttaatttttcattgtttcaattttaatttaaaaaattgtttagaggcagggtcttgctctgtcatccactggggtgcagtgcacaatcatagcttactgtaatcttgagctcctggactcaaggaaaactcctgccttggcctcccaaagtgttgggattacaggcataagccattgcacccagcctgtaacatttttactttataaactttaaatattaaaaatattgacttttgtaataatacttagcttaaaacacacacacattgtacagctgcacaaaatattttccttctttgtttccttattctatatacttttttcaatttttgtttttttcttttacttttaaaaacctttttattaaaatctaagacacacactgatatagtttggctctgtgtccctacccaaatctcatcttgtcgctcctgtaattcccacatgttgtgggaggaacccagtgggaggtgactgaattacgggggcaggtgtttcttgtgctgttctcatgatagtgaatgggtctcatgagatctgatggttttaaaaaatgggagttgccctgcacaagctctctctttgcttgccaccatctacgtaagatgtgacttcctcctccttgccttctgccgtgattgtgaggcctccccagccacatgagtccaactaaacctctttcttttgtagattgcccagtcttgggtatgtctttatcagtaacatgaaaatggactaatacacacacacattagcataggcctccatagggtcaagatcatcactatcactgtcttccaccttcacatcttgccccactgcaaggtttcctgggccagtagcacacaaaggagcaggtatacatgctaaaataatataaaaagtatagtatagtaaattcataaaccagtaacaaaatcattatttattatcattggcaaatattatgtactacatatatgtaactgtatgtgttatacttttatatgactggcagcacagtaggtgtatttataccagcatcaccacaaacatgtggctaatgcctcatgctatgacatttttacagctatgatgtcactaggcaacaggaatttttttttttttttaagacagtctcgctctgttgcccaggctggagtgcagtggtgtaaccttggctcactgcaacctctgcctcctgggttcaaccaattctcatggttcagcctcccgagtagctgagattacaggtgtgtgccttcatgcccagctaatttttgtatttttactagagacagggtttcgccgtgttggccaggctggtctcaaactcctggcctcaagtgatccacctagcatggcctcctaaagtgctggaattacaggcgtgagctctctgcacctgggctggcaataggaatttttgagctccattgtaatcttatgggaccaccatcatatatgtggtccatccttgaccacaatgttgttaggcagtacgtgactgtagtcagagtggcctttgtgttgtttgcctgtagcacctaaagagtctttggaacaaaaccagtaaataacaacatttgttacatccaatttaatccaggatttttgagtcatgcttgatatttttattgacagtacatgaacaatttcaataattcttaaattttatttatttttaataaataatagctatatatttatgatatgtaatgtgatattttgatctacgtatacgttatagaaaatattcaatcaagataactaaccttatacatcacctcactgacttttttttgtggtgagaatattgaaaatctatttttttttggcattttgaaacatagaatacattattaactgtggtcaacatacagtgcaatagatcaccaaaacttactcttccaggccgggcgtggtggctcatgcctatgatcccagcactttgggaggctgaggagggcagatcacctgaggtcaggagtttgagaccagcctggctaacatggtgaaaccccatttctactaaaaatacaaaaaattagccgggcgtggtggcatgcccctctaatcccagctacttgggaagctgaggcaggagaattgcttgaacctgggaggcggaggttgcagtgggccaagatcgtaccattgcactgcagcttgggcaacaagaacgaaactctatctcaaaacaaacaaacaaacaaaaaaaacaaaaactttctttcccagtctaactgaaactttataccttttgagcaacaactttcctttccccattcctcttcctccccaccgcccattgtaaccacctgtctactctctgtttctaagagatcaactttttcagattccacataagtacaatatttttctttctgtgcctagcttatttcaattagcgtaatgtcctccggttccgtccatgttgtcaagaattacagaattttcttactttttaaagctgaatagtattccattgtagtttataaaccacattgtatttatcgattcatctgttgatgaacacctagattacttccatatcttggatattgtgaacaatactgaaatgaacatgggagtgcagatagaatcccaagccatgattttaaccactctactttctgtacctgttgtagatgctcttttttttttctctaaacgtctgtcttgtacaaatattggccattaaggaattaagtagtggatcttttcatctaagcattttgttgctttatagtttacaaagagagtccagaatttaaacctaagccatctaagcttctgaatagcttatactgaagtaagaatcctaggagttttaaagacactggttcttcccagctgtgctactattagattagcataacttattaaagtagctagagataaatatcccaatggcactctttaagcacagtaaagccagtggaaactgcccaattttatttcttatttttttaatttacttttttttccattcattgatggattgatggataacaaatatagaacaaatgatttaaattttgtggtatatatgcacaatgcccattttaaatcgaccataaaacttaaacaattttttttttttagtagctttatgagtacaagtagttttgggctacatggatgaattgtatagtggtgaagtctgggatagcgcacccatcacccaagtagtgtgcattgtacctaataggtggtttttgtcctttaccctcctcccaccctccccctttctgagtctccagtgtccattataccactctgtatgcctttgcatacccataacttagctcccacttaaaactaagaacatgcagtagttggttttccattcctgagttacgtcacttagaataatggcctctagctctccatccaagttgctgcaaaagacattattttttcttttttatggctgagcagtatttcatggtgtatatatatgggtgtgtgtgtgtgtatgtgtgtgtgtgtatttattttctttatcctctaattcattgatgggcacttaggtttgttccatatctttgcaattgtgagttgtgctgtaataaacagataaacatacgcgtgcaagtgtctttttgatgtgattacttcttttcctttgggtagatactcagtagtgggattgctgaatcgaatggtagatccacttttagttctttaagaaatctccatactattttccatagaggctgtacaaatttacattcccaccagcagtatataaacattctcttttcaccacatccatgataacatctattgtttattgacattttaataatgggagttttggctggggttaggtggtatttcattgtggttttaatttgcatttccctgatgattagtgattttgagcactttttaatatgtttgctggccatttgtatgtcttcttttgagaagtgtctattcatgtcatttgcctactttctgatgggatcatttgtttttttcttgctgatttgacttccttgtagaacctggatattagtcctttgtgggctgcataatttgcaaatgttttctcccattctgtaggttatgtttactctgatgattgtttttttggctctgcagaagctttttcattcaattatgtctcatttatttatttatttttattgcatttgcttttaggggtcttggccataaattctttgcctacaccaatgtccagaagagtttttttcctaggttttcttctagaatttttatggctttaggtattagatttaagtctttaatccatttggagttaatttttgtatagggtgagagatagggatccagtttcattcttctacatgtggctgtctaattttctcagcgctgtttattgaatagaatgtccttttcccaatttatgtttttatgtgcttcttgaatatcagttggttgtatttggctttatttttgggttctttattctcttcctttggtctatatatctacttttataccagtatcatgctgttttggttactatatcttttttttttttttttttttttgagacaaagtctcactgcgtcacccaggctggactgcagtgaggcaaacacaaatcactgcagccttgacctcccaggctccagtgcttctcccacctcagcctcccgagtagctgggactacaggtgcacgccatcatgcccagctaatttttgcattttttgtagagacaaggtttcgccatgttgcccaagctggttccaactcctgggctcaagtagttctcctgactcggcctcccaaaatgctgtgattgcaggcatgagccactgcaccctgcctactatatccttatagtatagtttgaagataggtaatgtgatgcctccagatttgttctttttgcttaggactgctcacaaagctattttgattgtaattcattattcagcgagaagagtttataataggtgatttatttagttaaaggaagaaagtttaaggaatcattaaggagataatagaccttgtcaataagcaagcattgaaataactgataagtattcattaaccagataaaaagaaggataaaattttaaaaggcccacattttcctcaatgcatgatggtgatatgtggtctgtggcatatacttgtatcaaggtcattcctggcactttcaaactatattatttaaaaacacacacacacaaaaacaaaaacagctgttaggacagaaacaccactcagagtagcttaagcaatgaagaagatttattggcctatagttgggaagaacaggaatggagtgggttttaactaaatggtatagagattctaattatgttgtcaggactctcttaccgcctagctctgattccctctttctgtagatcctcttctcatgtagacggctttcttccaagtggtggtgatgatggtggtggtagaaggagctttgtgaggaggaagacacagtgacagaaagtttcagaattaagtcattccaaaggaaagtcttcccccaaaggccttcccctctgaaatagccctgtaagtcatttattctttgtttaatcaactgtttcctccatagcctttatcacaaattatctcttttatttatgtgcttacctgattattgtttttccttccaattacaaggtaaaatccatcagagcagtaactgtgcctatttgtttcattactgtagccccagcatcttgtaggcactcaggaaatagtaagcagcaaatatataaaattccaggaagggactcagatcctccttgagccatttgtcattattgtggtctgcagggtagggtactgtgattgatatacctactagaatctcatggaatagggaaatggatttaccataggtaatggagataccattagctaaaggaattgggaaaagatgctgagcaaacaacaacaaaaaatatctgtctagcatatatgttttttgtcttttaagcacagtttcatattttacccaactgcctagtctgatgtgtaaggttatgcagattctgcactgcatgaaggtacttgctgaggggacagagcgtgggctaaaatccagcccagagctccatttacagggcttcctttttccaggaggcactctgtttttaattttgtacacatttggatggtctctgtgtatggtatacctggttgagtatccatctctgcatctaaacttctggatagcttataccgaagtaagaatactaggagcaaaagtatgacctggatgtgtctgtgcatctggatccccctggccagttcagtgttgactatgtgcttagccacgttctgcacatattctgcgagatgactgatcttgggaaattctgagatgactggtcttgggaaattcccccttgttttctttctctcctctctatttttctacctagttttgctatttggtcaggttttcaaagcacagattttgagctttctgaactttagaatggctgaatggtgacactgtcatctctctttcttgtttacctacatttctctgcatttccattttgatcatcctggtaattctgcatcaggagggaagtttcctatcactggtcctcctatggaatagacctgtcttatagctcaatctctttggggtttgttttgcattttatttgattaaagatctattggggcagtgaaatactcactactttttaaaaaggtagatgagttgaaggaacagacacccactcaatctaactcatgtgaagctgaagggaatctcctaagttccagatgtatagctcagcctttcattacctggaaggctctctgcccttttctctctttctgggactacatcgttttatctctgcttcactctggccattggtttcattaatctgattttctttaaacaccaactttctgtctatactggccagcctataagtggcaaaaatgggaactagtgcttaatctactcattggagtctcagtgcaagtccacaggaagtctgcaccataatcatcacatggaaaagttaaaaataaaaaagatttatgggcctcaaacacacacattctgagtcagtaggtctggtgtcctggaatctgtattttaaaaatgttcctcagaaggaattcccagatcccagacccctctgtaatcacaagagagaggaaaggaaagtgagtgagtgatggaattgatgaaccaggccctaacacccacttacgtcctacatagccccttctctttctccctttgccattccttgctattgatcttcctatccagagaggagatggatattctaagacattggaaacaaatactgaggaatatagtagttttcattaaaagcagcaatagtagcagcaacaattctcagtctagcttggcaggaacgcagtccagttaggttttggggccacccatcccttatcaaatcagtgccatttttttggtcttagatgctcttggaagtataagacaggcctaggtgtttctgagaaacacctgatagcttggaaagccttgccagctatggcagcaattgtcaggttttcttcctggtcaggtcgtgggtgaccttgcagcttcagtgcccatcactctttgatgtgccacagttatgtgtttgtgtctcttagttcaaagtcttcaaagagactctagtcactgagtggccagccagtcagggttctaccctgggattatgggccagagcagactgagaactatgaatggacagggcagggcataaataagtgcgttacaagctttcttctggctggtttgcaaatggaggtttaagtgaatatttgtaatttctttttagttttgttattcctaaatgaaagaaggtttatattcctaaatcaattataatgagcttttatatctcagaactacaaatatgactccagcctcattttatttgtgaaataaatgccctatatagtattcaggatacctaccaagtgtttttatagtaaacatcatccttgtctcttcatatcttaataataaaatgtatattatattaagttgtaaataaagtaatatggtttattatttaatgtttaaagtataatgccatatatcttttgttgtgtactgacagatgcaaagggtatagcaatttgattctgagtccttgcaatagtaataaaagccattactttatttaaaacatttgtccactgtgggatttcaagaggcagttgaagaccttacgtggatattgatcacataaagtatgcaaagataagaaatacttttaaccaagattgagcacaaaaatagctctgtattatatttctgtacacaaagcagttgtgtggcacaaaacagttatgttttaagcccacaaagtatagtatcagtaccgtagggttggtttaagaacatgtgtttttaatacctttataagaattgaagtatctatcttgatactgaaactatcttgtttctctgatttttaaaaattattttatttttccagatccagtccttctgtggaacttctgaacatcttttattagtggaaatattttctacacaatgaagtcaacaacttaatttaaaccagtgtttgtgcggttctgattcatctgctgtggttcccgaagcttgagatctaaggagtacagggtcttttgtgatgacaatatgactaatagtaaaggaagatctattaccgataaaacaagtggtggtccaagtagtggaggaggttttgtagattggactttacgtttaaacacaattcaatccgacaagtttttaaatttactcttgagtatggttccagtgatttaccagaaaaaccaagaagacaggcacaaaaaagcaaacggcatttggcaagatggattatcaactgcagtacagacttttagtaatagatctgagcaacacatggagtatcacagtttctcagagcagtcttttcatgccaataatgggcacgcatcatcaagctgcagccaaaagtatgatgactatgccaattataattactgtgatggaagggagacttcagaaaccactgccatgttacaagatgaagatatatctagtgatggtgatgaagatgctattgtagaagtgaccccaaaattaccaaaggaatccagtggcatcatggcattgcaaatacttgtgccctttttgctagctggttttggaacagtttcagctggcatggtactggatatagtacaggtgggttttcatctttatttaactttactgtctttttttgttattccatttctgtttaaaatgctttatgtaggttactactctcaaacattcactttagatttaatttatcccttggtaaaatgaacagatgctgactctgggagagaatctatttctaggtgggagtttttcttttttcccctttagaaattctgaaagaatagttattctgactgtaaagtaactcttctctacagaccttggaagagcttggttaaaagaaaatcttcccaaaatgttatatttaaatactttcttacttttaaaataaaaattaatatatactcattaaaatgacttcaaacattagagggtattaaataaaacatgaagtttctcctattccttatctccgaatcaaaactctcctcctctccagagattatcattgtgaagtgttcgttgtatacacttgcagcctcttttctatgcttacatatatacatatgagagtttttccaaaaataaaaataaaatgttgcatatatttttctgcaacttattttcattgcttaataatacatctctccaaattggtatacaaagattttctgcattttaaactgagtgcatgatattccattgtatgtatataccaaaatttacttactcattcttccttattggtgctgtaataactatccttataagaatatatattcatatagtaatgttttcataggatagatttaaaaacagcattgttggatattagggtatgaattaatatctatgtttaaaattttgtagatactgtcaagtcgcattccaaaaaatttgtatcaatttatactcctactgtcaaaatagaagtacttttattttttcatgtccctatcaacattgggtatttattttattttattttattttgagacagggtctcgctctgtggcctaggtcactacaccctcaacctcctgggctcaagtaaccctcccacctcagcctcttgagtggctggtactacaggcgcactacacctcactaattaaaaaaaatttttttttagagacaaggtcttgctgtgttgcccaggcgggtctcaaactcctgggctcaagcaatcctcccaccttggcctttccaaagtgctagggattgcaggtgtgtaccactgtgcccagccaacactgggtcttcttgatctttttcatatttgccaaatggcaggaaaatgttatcatgttttaattaacattattattaatgtttagcatattgtcatgtgtttattggccattctttttctgtgaattattttttgtatcttttatttatttttaaaatttatgtgctacttattgatttgtaggtattctctttttttttttattttttttaaggcgcagtctagctttgtcacccaggctggagtgcagtggcgtgatcttggctcactgcaatctccacctcccaagttcaagtgattctcctgcctcagcctcctgagtagctgggaccacaggctcacgctaccatgcctggctaatttttgtatttttagtagagatgttggttaggctggtctcaatctcctgacctcaagtgatccgcctgcctctgcctcccaaagtgctgggattacaggcatgacccaccatgtctagccgatttgtaggtgttcttaatgccttgtggttaccaaatacctattatataattatctttctaaagtaataagttgccaaaatgtgacattttgttctgtcagtttttgtttatcagtcatagaaaggttgcctctgggaaactattagatatattatcttataatgtgctcttatctttcattgtttgttccctaaaggaacctcaggttatttgtgactctaagatgctattcaagaggtaacatttttatctaaatggaaaatatacataaatagaaacatttttccaccatcagttggagaaaggatatgagaggaactatattgcagtacattaaagttttaaatagataataataccaaagagagagcaaacctacatccacttgaaatataattgttttaggttcttatagtagtatcacagctgcgacaataaataggctggttttggtttggattttttcttgagataccaattattctgaagaaacactcagtatttaactatagaatggtaacatctataggactaaggtgttagagtacagcttagcagaatgtttatatagctcattatgtatctggagtaatgttgacttacttcctgatactgagagaacagcacgcatataattggaaaaagttccttttatgattttatgaacttttacagtgctagccctaaggactttataatgttaaactttagtgttaaacattgtagaaacgtaatataaattttttttttttctttttttgagatggagcctcgctctttcacccaggccggactgcagtggcgctatctcggctcactgcaaactccgcctcccgggttcatgccgttctcctgcctcagcctcccaagtagctgggactacaggcgcccgccaccgcgcccggctaattttttgtatttttagtagagatggggtttcaccatgttagccaggatggtctcaatttcctgacctcgtgatccgcctgtctcggcctcccaaagtgctgggattataggcgtgagccaccgcgcctggccgatataaatatttttaaagactttatttgaatgtgctcttttaaactttttaattgaaatgtaatacatctagagtatataaaataaaaaatagagactctggattttcgtaatataaacaaccatgtaactatcaaccagctcaagaaatataattttgccagtactgcttctttagtcctccttgtgccttcttccaattgctgccctttttgtccccatcaccaaaggtaatcactaatctgattttctggtaagcacctctttgcttgtctttataagtgtgtatccctaaacaacatagtttggttttacttgactctttttaaactatataatggaagtatagaacatggttttttgtgtgtgtgtggctttttttccctcaacattatataaatttcatgaaactgtagtttatttccattgctggatagtaatccattatatgaatatactgtaccacaatttatctattctgctatgaatggacattgggaggaatggtgcttccagactcttttttttttttgagacagagtttcactcttgttgccctggctggagtgcaatggtgcagtctcacctcactgcaacctccaactcccaggttcaagcgattctcctgcctcagcctcccgagtagctgggattacaggcatgtgccaccacacctggctaattttgtatttttaatagagatggggtttctccatgtgggtcaggctggtcttgaactcccgacctcaggtgatccgcctgcctcagcctcccaaagtgctgggattacaggcgtgagccaccacaccaggctgcttccagacttttgatgcacatatgcatgaatttcttttgggtatatatgtagagatggaatttccaggtcttaggatatggagatactcaaatttagtagatgtcatatgattttccacattggttgcaccaatttacagtctaattagcagagtacaagagatctcaatactctatattcttatttctacttggaatcagtagtctttttatttttagaaattctggcacatgtggagtggtacctcattgtcgttttaatagagatttctgtgataactaatgatgtatatttggatattactggtaaagctttctttgtccatctttctatttgtttttcttatagatttatgggagctgttatttgtttttcttatagatttataggagttacattttggatatgagccatttagtgctatatatttaaaacatcttttctctcctctgtggcagaagttcttaattttgaaatagttcttttcctcctgctttttcatagtttgtgttttatgtctctcgtctaagaaatctttccataccctgtggtaattaagatattctattacattactttgttgaagctttgctgttttgctcttacatttagatcattccctccctggaatggatttttgtgtagagtatgaaatggggcttatgtttggttactggtttcttgaggttttctatttcttcatggttcaatagttgtatgtgtccagaatttatccttgttgcatgttttccaatttgttcgtgtatagttgttcataatagtctttgatgattctttgtatttttgtggtctcagttgttatgaatcctttttcatttctaattttacttatttgggacttctctctttttttcatagtctagctaaaagtttgttgattttatcttttcaaaaaataactttttgtttcattgatctgtatttttttagtctgaatttcattatttctgctctgatctttatttaatttcttttcttctactaatttggggtttgaattgttcttgcttttctagttccttggggtgcatagttaagttgtttatttgaagtctttctatttttttttttttttttgagatggagtctcactctgttgcccaggctggagtgcagtggcacgatcacggctcacttcaagctccgcctcctggattcacaccattctcctgcctcagcctcctgagtagctgggactacaggcgcccgccaccccgcctggctaattttttgtgcttttagtagagacggagtttcaccgtgttagccaggatggtctcgacctcctgacctcgtgacccacacgcctcggcctcccaaagtgctgggattacaggcatgagccaccgcgcccggcctctattttttgacatagtatttattgttataaactttcctcttaatactgctattgctgtattccatagattttgacatgttgtattttcattttcatttgttgcaagaaaattttaaattttaaatttccttcttaatttcttcatttcattggtcactcaggagcatgtggtttaatttctatgtgtttgtgtagtttctgaggttcatcttcttattgattctagtcttattccattgtgctctgcagagagacttgatctgatatctacttttttgaatttgtggagaatattttgtggcttaagatataatctattctggtagaatgttctgcgtgctgatgaaaagaatgtatcttctgtagcagttgggtgaaatgttctctaattatcagttaggtctgtttggtctaatgtgtggtttaactccagtgtttctttgttgattttctgtctgactgatctgttcattattgagagtggagtgttgaagtcccctactattactgtattgtagtctatctctctctctttagatttataaatgtttgctttatatacttagaagctctggtgttgggtggatatatatatatatatacaattgttatgtcttcttgctgaattgacccctttatcattatatagtggtctctttttctcttttactgtctttgatttgtagtctattctatctagcataaatatagctattctttgctcttttcttggtttctagttgcatggaatatatttttctactgcttcacctccagtctaggtgtgtctttatagatgaagtgggtttcttgtaggcagaaacctgggtcttgtttctttacccatgtagccactctatgccttttcattggagaattgagtaatttacattcagtattattattgataagtaaggacttacaattgacattttgttgcttattttctgcctgttttgtaactcttcctttcttactgtcttcctctgtgattcgtttgtgatttttctctagttgcatgtttcaatttgctgctttttatttttagtgaataagttatagatttttacactgtggttaccataaggcttaaaaaaaaatcttataatgttattttaaagagatgacaacttatcttagatcacaaagaaaataatagaaacaaagaaaaaactaagaaactctacactttaactccaccccctccatttttgacctttggttattccaattttcacatttttatattgcctatctcttaatgggttgctgtagctattattgtttttgatagatttgtgttttaggcttcatactagagttatgagcggattgcacaccctaattacagtattagagtattcttggttttgctgtgcacttagttttaccagtggattttttatcttcaactgttttctttttgcacattagtgtgtttttctttcaggtcaaagaactccctttagtatttcttataagacaaaactagaggtgctgaattctcccagcttttgtttgtctgggatagctttgctggttatagtattcttggatggtagcttttttttttttcttttcaaatttctttcagcattttgaaaatgttatttcaccctcttctggcctgtatggtttctgctgaaaagtctgttgccagatgacctggagctccttcacatgttatttcttctttttctcttgctgcttttaggattctctctctttgacttttgagattttattattatatgccttggggtagtcttatttgggtcagatctggtgttctctgaccttattgtatctggatatttatagctttctcaagttttggaaagttttcagtttttatttctttgaataagctttctatcccttgctcttgctcaactccctcttgaatatgaataattattagatttcgtctttcaaggtagttttttatagcttgtagacaatctttgatcctttttttccttcttgtttttttaagagacagggtttctttctcccagactggagcccagcttcaaattcctgggctcaagtgatcctcccacctcagttcctaagtagttgggaccacaggcatgtgacaccatacccagctaattttttattattattattattttattttattttattttttgagacagagtcttgctctgtcacccaggctggagtgcagtggcatgatctcagctcactgcaagctctgcttcccaggttcatgccattctcctacctcagcctccctagtagctgggactacaagtgcccgccaccacacctagctaattttttgtatttttagtagagatggggtttcactgtgttagccaggatggtctcgatctcctgaccttgtgatccgcctgcctcggcctcccaaagtgctgggattacaggtgtgagccaccacgcccagcccatatccagctaatttaaaaaaaattttgtcgagacagggtcttgctttgttgtgcaggctgtttttctttttctttttttcttctctgtgtattttcaaatagctcaccgactctttcttctgcttgatccattctgttgagagctttcaatgaatttatcagttcagcaaatgtatttctcagttttacgatttgttttcttttatttttattatttcaatctctttgttaaatttctctgataaatttctgcattacttttccttgtcatcttgaatgtttaacagaattcccttttaaattccagcaagactttttgtagatataaataagattattctaaaattcatatccaaacggaaagaaaataggatagctgtaacaattttgagacaggaaaaatttcaagaattattatatggtttaataatccagactgcatgatattagaggatggatagacacagagatcaatgccacagaatggacaacctagagagagagacccacacaaatacatccaactaatttttgacagaggtgccaaagcaattcagtggaggcaaaaatagccttttcagcaaatggtgctggagcaattcaacatccataggcaaacaaataaatttgacctgagtctcgtgctttatagaaaaattaactcaatatggaccacacacttaaatatgaaatgtaaatgataaaacctttagggaaaaaacaggagaaaatctcaggatttcagactaagcagagttcttacacttgacaccaaaaacatgatccataaaaagaaaaattaataaattggatttcataaaagaaacagttcactctgaacaatgctaaaaggatgaaaagacaagctacagagtgggaaaaaatattttcaaaccacctatctgacaaaggattagtatatgtaagaactcttaaatctcaacagttaaaaaaaaattagaaaattggcagaagacccagagcagttcactgaagaacatatacagatggcagataaacacatgaaaagaagttcaacatcattagccattagagaaatgcaaatgaaaaccacaatgaactatcactacacacctatcagaatggctaaaataaaacatagtgacaacactggatggagttagcatgtagagaaaggatatcatgcattgctgttgggaatataaaatggtacagctgctgtggaaacacttttgcagttctgtaaaaaaacaaaccctaaatattaactaccatgtgacatagcaactgcattcctgggcatttatccccagagaatgcagacttatgttcatacaaatcctctacaagaatggttatggtagcattatccatggtggctaagaactggatacaaccgaagtgtccttcaacagttgagttaaactttggtaaattcatatgatggaatactactacccagcaacaaaaagaaataaactattgacacatgcaacaacctagatgaatctccagagaattatgctgagtgaaaagctaatcttaaaatattatagattgtattacttcattcatacaaaattctctgattgataaaattatagaagtggagaacagattagtggttgccagtggttaaggaggtattagtagtggagagaaatggctctaaaagagaattaggagagctccttgtggtgatggaaatgttctatatcttgactgtatcaatgccaatatcttggttgtgatattgtactgtagtttttgcaagataccactggggaaaaatggggtaagggttacatgggatctctctgtattagttttttataactgcatgtgaatctacaattacttcaaaataaaaagtttaatttaaaaaaagtaatatgtgtacctggttaagcatatttaagcagtatgaaagagtaagtgatggagaaaaaagtctgtcctctgctgtatgcacccttagcccgggcccttccttagaaatgactgtttttagtttttttttttttttttttcatgtatctccttcaacagacatgaaatgaatgtatttgcattaatatatatattttctaaaaaacaaaaactaagtaacactctataatgttgctcttcactttgatcttcttaatttgtcttagagctctttcactgtaggtacacacagatttaccaaattcttctcagacagataatgcactaatataaggatgtatcataattaatctgccgagttaccttatgaaggggattttaattgcctcaaatctttggctgttatgaacaatgatgaagaagagtcattatatgggtgtgtttttgaactcatatgcaagtttgtttataggtcagattcctagaagtagaattctgagtcaaaattttggtcgttttacatttgataggtattaccagattccaccaaagaagttaaacatttacgttttcacaagcagtgcaaaagagtgcctatgtccttatactcttagcaaaagtgtattttccaactttttgatctttaccaatctcatcagtgaaaacttttcaccttttcatttgtatttctataattatgattgaagttggtcattttgtcatatgtttaaaagtgaataggtttattttctttttatatatatatattttatatatatatttattttattttattattatactttaagttttagggtacatgtacacaatgtgcaggttagttacatatgtatacatgtgccatgctggtgtgctgcacccattaactcatcatttagcattaggtatatctcctaatgctaccccgtcccccctccccccaccccacaacattccccagattgtgatgttccccttcctgtgtccatgtgttctcattgttcaattcccacctatgagtgagaacatgcggtgtttggttttttgtccttgtgatatttactaagaatgatttccaatttcatccatgtccctacaaaggacatgaactcatcattttttatggctgcatagtattccatggtgtatatgtgccacattttcttaatccagtctatcattgttggatatttgggttggttccaagtctttgctattgtgaatagtgccgcaataaacatacatgtgcatgtgtctttatagcagcatgatttatagtcctttgggtatatacccagtaatgggatggctgggtcaaatggtatttctagttctagatccccgaggaatcgccacactgtcttccacaatggttgaactagtttacagtcccaccaacagtgtaaaagtgttcctatttctccacatcctctccaggacctgttgtttcctgactttttaatgattgccattctaactggtgtgagatggtatctcattgtggttttgatttgcatttctctgatggccagtgatggtgagcattttttcacgtgttttttggctgcataaatgtcttcttttgagaagtgtctgttcatgtccttcgcccacttgttgatggggttgtttgtttttttcttgtaaatttgtttgagttcattgtagattctggatattagccctttgtcagatgagtaggttgtgaaaattttctcccattttgtaggttgcctgttcactctgatggtagtttcttttgctgtgcagaagctctttagtttaattagatcccatttgtcaattttggcttttgttgccattgcttttggtgttttagacatgaagtccttgcccacgcctatgtcctgaatggtaatgcctaggttttcttctagggtttttatggttttaggtctaacatttaagtctttaatccatcttgaattaatttttgtataaggtgtaaggaagggatccagttttagctttctacatatggctagccagttttcccagcaccatttattaaataggaaattctttccccattgcttgtttttgtcaggtttgtcaaagatcagatagttgtagatatgtggcgttatttctgagggctctgttctgttccattgatctatatctctgttttggtaccagtaccatgctgttttggttactgtagccttgtagtatagtttgaagtcaggtagcgtgatgcctccaactttgttcttttggcttaggattgacttggcgatgcgggctcttttttggttccatatgaactttaaagtagttttttccaattctgtgaagaaagtcattggtagcttgatggggatggcattgaatctataaattaccttggctaaaatggattcacagccgaattctaacagaggtacaaggaggagctggtaccattccttctgaaactattccaatcaatagaaaaagagggaatcctccctaactcattttctgaggccagcatcatcctgataccaaagccgggcagagacacaaccaaaaaagagaattttagatcaatatctttgatgaacattgatgcaaaaatcctcaataaaatactggcaaaccgaatccagcagcacatcaaaaagcttatccaccatgatcaagtgggcttcatccctgggatgcaaggctgattcaatatacgcaaatcaataaatgtaatccagcatataaacagaaccaaagacaaaaaccacatgattatctcaatagatgcagaaaaggcctttgacaaaattcaacaaccccttatgctaaaaactctcaataagttaggtattgatgggacatatctcaaaataataagagctatctatgacaaacccacagccaatatcatactgaatgggcaaaaactggaagcattccctttgaaaagtgtcacaagacagggatgccctctctcaccactcctattcaacatagtgttggaagttctggccagggcaatcaggcaggagaaggaaatacagggtattcaattaggaaaagaggaagtcaaattgtccctgtttgcagatgacatgattgtatatctagaaaaccccattatatcagcccaaaatctccttaagctgataagcaacttcagcaaagtctcaggatacaaaatcaatgtacaaaaatcacaagcattcttatacaccaataacagacaaacagagagccaaatcatgagtgaactcccattcacaattgcttcaaagagaataaaatacctaggaatctaacttataagggatgtgaaggacctcttcaaggagaactacacaccactgctcaatgaaataaaaagaggatacaaacaaatggaagaacattccatgctcatgggtaggaagaatcaatatcgtgaaaatggccatactgcccaaggtttattttcaaactaagtttaaatgacaataaaaattttttccatatataaggatttggagtatgtgtttttttaactgcataaccttcttttaccaattaaaaaatgttctctgtcattttaaagttaggagtctatagatgtgttcttcaacttattattttgaattttcatttttgtttattcttgtggatttaaacagatttttaggttttgagtctattatttatgtaagtaatctgacattatgtttgacttgtagatgtatacctcagtttctgcagtgatgcatgtgcaaagttaggtatgacaagaagtcatactttacggcaggttcatagctccagagcacatactggatcatggtaaaatttgtaagtaagtgaacattatttttggcactagctgcttcagcattccctctctggacattttctgcattatgtcctcttgacaggaaaattaactgataatgcatcctggtcttacagctaataaacactcagttaattactatgtgcaggcacagtcctgagcagaatcttctgaggtggtacaagtatgtccatattttagatgcagaaagtaaagcataattttgcccaaatcacacagtaagtagtagagtcagaatttcagtgaaggtgatctgactctagagcccttgctgttgacccctgtgcatactacttcatactcttctcatagttcccagttgtgtgtcaagacactccagggttactgtgggatattttaagtttttgagggaaacacaatgatgtctcctggatgcactgtagactactagctcaaggtggcttaacatttcaacattagatcacactccatttctttggatggtatgtcttttgcagaactgggttttcagtagtgctgtgataaaaagcaagagtcacacaaaaatcaatataaaacaggaaatgaaggtgatagtttccaattccaacatttgagaagttatgcagtgccaaacaggtacttataccccattagtaaataattatggttgtaaaaaatgacattaaatactattttttctttcaatttacctgtataagttcttcaaatggttactaaagtgttaggaaataaatacttactaggttgttcggacctaactacttaatacataggattgttaggtattctttttgtcctaaggatgctatgaaaatatttctcagatactaagcgtgccgtgaactgagaaagtttgggaacttctgcaagcacatcaggttgtgttaacttttttttttcttttttttgagatagagtctcgccctgtcacccaggctggaatgcaatggcgccgtctcagctcactgcaacttctgcctcctgggttcaggcgattctcctgcctcggcctcctaaggagctgggattacaggcacttgccactatgccagctaatttttgcagagatggggtttcaccatattggccaggctggtctcgagctcctgacctcaagtgatccatctgcctcggccttccagagtgctgggattacaggcgtgagccgctgcccaacctggtgttaacttttgaatgatgaggtacataaatttggaaaggagagctttatatttcatacagggttgcagcctgcaaggtggccattctgacagtctgggaagcatcgcctctagccagaagccagaaacagacacttcaaaggaggggaaaaaggaaataggaatttatgctgggtggggtggccaaatgtacgtatttaatatgctataagaggagtcatgagtatttgtgaaaagagaaacgtgcatgtgcagtggaacttcataccccttcatgagtcccatgtagactggccagaaccactctgtgatcactggtctcttaccaggaaggaatcctggtcagttgttttgctgaaactacaaaagagggtgggagcagtcaagatcagcagtggagtcttttgaaaaggttgatttctgtgtagcccttagggaagaaagcctaatggcagttaacaagggtaaaggggtataatggggtgtggttgatctcccatgctgtcctggccgagaactcagttttcaaggtcacgctgtcctcttggccgtaagagtgttctttcagttggttttggggcatttggatttttatttctcactagtatggaaaaaataatgtagaattttttggcacaagataggagatcaataattcatagctcttattgttgtcacaccaatgctgaggtgttaagtatttcatagtaattctcccataagtatttcatttgagttgaatgtggaaagaataaccaaagggagtaacctataggcgtgcattccaacaggtctaaagcatgatggcatgtgatgctttcatgttgcaacaaccaacacagaagacttctgtgaccaaatgtgtgggggttttaccctacacaccaagcaagcagtcagttctgcagcagacactggctgatgcagaattagtgttctccaattcaattctgacattatccagaggtagcatcagatcccacaggttgagggctcagtccaaaagactgtcctccgcttgagataccagatgcaagtcctggcctccagaatttctgaccaactggctttaagctggggttccggtgatctcctcttcgggcttgattggtctgctgaagctgctcacagaactcaggcaaacacttaactctacctgtttctcattaaggttattacaaagaatacagatgaagaaatatgtagggcgaggtatgggggcagagacacggagctttcatgccctccctgtgtgctccctcatccaggaacttccaaatgttcagctgtgtggaaactctccaaaccaagtccttttggacttttatgaagcttcattatgtaggcatgattattaaacccctggtcatcggtgatcaacttaaccttcagtccctccatcctccccaaaggtgtttgtgtgggtgggggtggtttgaaagtcccagtcctctaataatgccttggtctttctggtgaccagcccctatcctgaagctacctggggctgccagctgtcatcaatcagcatacacaaagacatcactttgtgtatcactaaattctaacgattttagatgtatgccaggaaacagggttgaagaccaaatatatgcttcgcagtatcacagcaagtgtcataaaatgatgacctaggtaaaaggtattctgaagtatatccgggatctgataaaaatcatacctatctcttaggtttgttgtgaagattaagtgagtgagtctaaagaacagtgcctggaacataacgatcagtgaatgttagatattattaatatttgttattattattatctgttattcatcattatcatcattgctaccaatgtctttgaaagatacatatttcattagcacatcagaattgttagcccatcataaaacatggacaaaatcgtttgctggttagtttttaagactaataatctggggtgccattgaacccccccacccagtgctttcttaggcccatccttaattggcttgaacccaattagagggatttcccttgtgaactctttgaaccaggattttacagaagactgatctgataaatattttctgaggtctctttaggccccccagttctacatctgtttggaacagcctagggaaagtttgggaacaaatcaaaattttccttcatttatctgatagatataagttttacttttctcatctgtcttggtattcatgacatgtatatttttgatactttttgatataaagttaatatgcctagctcataaaatatcttactgggataatcacctcttaatagcacttgtaaaatgtcactttgtgttattaagatatttgtatctttaatatctttatatatatctttaatatctgttattttaatatctgttattttcattatcatgtgtaaaccaaaatcatccaagacaggcctcaatttagaagtttattttgccaaagttacggatcatgacctgtgatacagcctcaggaggtatggagaacatgtgcccaatatggttgggttatagcttgattttgtacattttttgggggacagaagttacaggcagacatcgatcaatacatgtaagttatacattggtttggttcagaaatgtgggacaacttaaaagtgggggcttccaagtcataggtggattcaaagattttctgattggcaattggtttaaagaattaaattatttgaagacctggaatcaatagaaaggaatatgtgggttaagataaggggtgtggagaccaaggttcttactatgcagatgaagcctccaggtagcaggcttcagagagaatagatggtaaatgtttcttatcagacttaaaaagttgccagactcttagttaatctctcctggatcaggaaaagacctggaaagggaaaaagttttgctacagaatgtagattttctccacaagagacagctttgcagggccattaaaaatatgtcaaagaaatatattttggggtaaaatacttcagtttcattcagggtctgctgtcatgtgatgctatactaaagactgtttggaatttggtatctcattgctacaaagagtctattttgtcagtcttaagatctctgttttaatgttaatgttggtcagttatgcctgaattttaaagggaagagggtataatgaggcatgtctgacccgcccccttcccattatggcctaagctagattttaggtttactttggaatgcccttggctgagaagggggtctattccattggttggggacattagaagtttatttttcatttatacatggtatttctccaaagactagatagggtggatattattttcatttaatggatgaagaaattgagatcagaaagatacatgactcatccaggatcatgaagccaagttatgacagatccatggctagaagcacaaaccttatttccagtttagtgctgtttttatgaacctctctgcctcacaccttaaaatggggattaaaacatgggattacttagaactcctggggtcaactctaggtcccatcttttgatcttggggaaataatttaatctctctgagtctttattccttcatttgtgaaattaggtagtaatagcactaattttccagtgggtttgttttaattagtattggaagcaagattcaaatcaattgtctgattccagaatctgtgctcttaaccactagccagtctaacgattgtcatcataaagggataaagtaaaacctttaggaatataagggttgtgtaacaagtagatgtagaataggttgtagcaacatatcagctgacccccaactctaacagcatcttttaaagtgactcagagcttcagagctcaggagaatggagttaagctaagtgctcgctgattacatgaactgtgtggttattcaaaatgtagatgccaagttgggaaaaaggctgagatttttagaaatgtctttgttctaaagtattttttaaagagtgccagaaaattttattttattttttttcttacagcactgggaggtgttcagaaaagttacagaagttttcattttagtccctgcacttcttggtctcaaagggaacttggaaatgacattggcatccagattatccactgcagtaagttttttcctacctcaaattatgtgtattacctatcctgtttctctctgttaaggggaacttgtatcaggaaaatatttctttctctgatatgcttctgcacttcagggctgtgctaagtagttatgcctgatatcatattctgaaatattgtctcatctgataattataggccctcttttatcccaggaagtagttacttgcctcctttgatgccaggacattctggcatttatcatcaatgcttaaggcatggggtaaatcagatattgagattctttgtggttcgatggttggttgattggtatttaaactttctgtaattgtagaagtaatacattcttattataaaaactacagaaaagggaacaatataaaaaagaaaatctaaagctacccctaattatccacttagatataacctctactaatattttggtacagatccttctatacctgcatatctatacttatatatagttaggtatatcataatgtaaatgcatactgtgtattctaaaaaagaactagaattctatatattctcatttataatctgtgatctccatttaaaaatacatcatgatcatctttccatatcagtaaatgtagatctgtgtcgttattgaatatgtacttttctgttgtatagctctactacagtttacttcatcatctattattggatgtttaaactccttctaacattcttctattatgaacaatgttgtgatgaatattcttgtacatacatttttccattcttatttttttagggcctgttctaggattgtaattactattcagaaaaaagaaatctgtacttttaagtctttagctacatattgcaaaattgtcattcgaaaagcataaacattttaaaaaatactgccagtagcagagttctgagttattttcagaagctcaaaaggacattgttatcttattataatatgattttggggtttgccattgtggaaccaagttatggttaaaaccacgtagctagtgaggttcacttcaatgagctatctgcctgtgaaatgctagccaaaacttaactaagtcaccagatgatattactaactgaaattcctttagtatataaagtttttttcctttaaagaagataaagcaagatagagttgatccatgtatcaattaggaaaaaatttatgtatctaaaggtaatcaagaaatgggaactgaacaactgtgctgttgatgggaggactctccaccctctgtcccacttctcctctcccccttttccacccaggcaactgccagtttcctaaagtttcttgagtaaagcagatgcttggaaagaaaatgcataaaataatgttttattaacattactagtttgcttaattttttattttttttgagacggaatcttgttgttgcccagactggagtacagtggcgtgatctcagctcactgcagcctctgcctcctgggttcaagcaattctcctgcctcagcctcccaagtagctgggattacagtcatgcaccaccatgcccagttaatttttgtagttttagtagagacggggtttcaccatgttggccaggctggtctcgaactcctgacctcaggtgatccgcctgcctctgccacccaaagtgctgggattacaggcgtgagccactgtgcctggcctggtttgcttaattaagggaaaatggctcatgtaccctacagagctttgtaagttccttccttatatagtatataaaaggtcatatagctatatctgcagaggacaataatgaaatatctggtattagtgagctcttattatatgccaggtcctttgctaactgctttccagtgatatcttataccaaccctatggaataagcactattatcctgctttgcagagtaggaattgaggcttagagcagttgagtaactttcctgagggcacacagctctacatatagtggaataagtcacattccagaatgttccttttacctgcacagggtaactctgtcagaatttataaaaccaataaataacagcagtaacaaaaacctaatagcttccccatgtactttgtaagaatgatctgctaaggtcttggtcttagcaccaatacttttggtacttaatatttaaaatatttaaatgttatttcaaacattattatttacagatataatgcttttccatgtagttagttggtaaactatagatgatgtttgggggtatcagtcagccacttaggtagagccaaactcatggagtagaattactttagtaaattcactttagtctatagtatgtagccattgtaattattgaacattaaaaggactgaaaaaataataggagctccttgggctgaagcagaaaagtatacaatgaatctcgaatatcttgtggtgccagaaagtaaagaagtgctaaaaatgaaaaaaaaaaaaaaagatggggacatgacaaaaggataacgagtgacatactggccagatcttggaaaattggagccatacaatagataatgacagttacagattatatataacccatggaaaaaaataagaatccattagtctatacatgaattaacaaggcaggcaaggtctctgctgtgatggaatttgcataaatttggatatcggtaagggaagtaaagaaaatcaaacaggataatgtgatgatggatgattcctgagggctattttacacaacgtggtcaggaaagacttctctgaggaggtatatgtaagctggaacctgagtagtaaaggtgagtcagccatatcggaatctgaggaaaaatcaatccaggttactattgtatttaataaatgtaacaatgtcaaatatttataagcattctagacagctgggcttttaacatgctttttaagcatgttaaatgcgttcgtcgttaaaagcattttaaatgctttttaagcatttaacagctaggcttggggtagcaatacaaatggagacctatataacatatgtctacatagtttaaaattatacaacaaacttacacacttaaatattttctctttctgtgtaccttgacaaatatatccttaggaatacctggaagtccaagatcagatttagaatttttggacttcttgggttctgttttggaacatggtgttgtagagagagccactgagccaccccctggtctgaggcctgccccaattcccttcccacctttggtaataggtactgcattttgaaagacctcacacatacaccaggccccatgtccaagctccatctacacctccaacaaacacccaccccttggcgttcctggggttcattggcacctaatggtggcatggtctgccttcaggaacactaacttgagataccttggtctcaggtatctggagcatatagtctaagatttatattggttcctgtatcccagtatttccttatataatggtgacatttggtgtcagctgaatgttgatttcaacacttgaccatttggcatacagctgcaatgtgtgtcaagtatatctctagcttttatctttaagaagaaaaaacaaaaaaacttttatgtagtcttgagaggtgacagcgtgctggcagtcctcagagccctcgcttgctctcggcacctcccctgcctgggctcccactttggtggcatttgaggagcccttcagtccccccactgcactgtgggagcccctttctgggctggccaaggccggagcccactccctcagcttgcagggagatgtggagggagaggcacgagcgggaaccggggctgtgtgcggcgcttgcgggccagctggagttccgggtgggcgtgggcttggtgggccccgcactcggagcagccagccagccctgctgtccccgggcaatgggggacttagcacccgggccagtggctgcggagggtgtactgagtcccccagcaatgctggcccaccggcgctgcgctcgatttctcgccgggccttagctgccttcccacggggcagggctcaggacctgcagcctgccatgcctgagcctcccacccactccatgggctcctgtgcggcccgagcctccccgatgagcgccatcccctgctccacggcgcccagtcccatcgaccatccaagggctgaggaatgcgagcacagggtgcaggactggcaggcagctccacctgcagccccggtgcgggatccactaggtgaagccagctgggctcctgagtctggtggggacgtggagagtctttatatctagctcagggattgtaaatacaccaatcagcaccctgtgtttagctcaaggtttgggagtgcaccaatcgacactccgtatctagctgctctggtgaggacgtggagaacctttatgtctagctcaaggattgtaaatacaccaattggcattctgtatctagctcaaggtttgtaaacacaccaatcagcaccctgtgtttagctcaaggtttgtgagtgcaccaatcgacactctgtatctagctgctctggtggggccttggagaacctgtgtgtggaaactctgtatctaactaatctgatggggacgtggagaacctttgtatctagctcagggattgtaaacgcaccaatcagcgccctgacaaaacaggccactcggctctaccaatcagcaggttgtgggtggggccagataagagaataaaagcaggctgcccgagccagcattggtaacccgcttgggtccccttccacagtgtggaagctttggtcttttgttctttgcaataaatcttgctactgctcactctttgggtccacgctgcttttatgagctgtaacactcaccgcgaagatctgcagcttcactcctgagcccagcgagaccacgagcccaccaggaggaacgaacaactccagacgcgatgccttaagagctgttaacactcatcgcgaaggtctgcagcttcactcctgagccagcgagaccacgaacccaccagaaggaagaaactccgaacacatctgaacatcagaagggacagactccagacgcgccacatcagaagggacagactccagacgcgccactttaagagctgtaacactcactgcgagggtccgcggcttcattcttgaagtcagtgagaccaagaacccaccaattccagacacagtcttactgagattttgagaattagtgaaattatatgcatgtgtttcatcttttcctacttgtattatgttataagaactggtgaattacctaggtagatagaactcaatccgagaggctttttggcgggagaagagaatgaagaggccttgagaaacaaaagtggcaacatttgaagaagaaagttatttgaatgggagttaaaaggtgcctttagtttcatttgttggaaattgaactttgctctgataaacatagttaagcatacaagaatttaagcaacttgataactttggcaggaaaagtgaagttttggctagcttatctcaaagaaaatatttcaaaagtattgttcttgagcattatccagaataataatagatttaaaacaccagtctgttttgaaataggccatgctgtagggaatctggttaaaaaacaaaatgctgcaaatgatatttgctgtttaatttgatcacatactaccgttaaacctgaatgaaggtgaatttaatctttttttaaccttcgttaatttgttgtggtgtctatattttacactaggtatttttctcaaatgtctggttatatgtatgtgtccatatttaagagaaggagtctcaggagctgattacaagcccagcacaggggagaagcttgccatctgtggtctctactctgctgcagggtgatctaacttagtatttctttagagaggtaggggtagagctgccagcttccattggttgagagctgtgctactgataagaagatagttcagtcaaggaaataagaaaacattataaggaaataagaaaacgtaaataagaagtgttgaggccatttgtgataggaatgccctaggcaatgcaaagggccagaggcaggactgttgttggtatgttagatcagtagttctcaaagtgtgctcttctgatcagcagcatcagcaacttgttagaaatacaaattctcagccccactccaaaactactaaattagaaactccagtggtgtggctcagcaatctaaattttaacacactctccagatgattctgatacacattgaagtttgaaaaccactgtgttagataaagagcatggaggccaatagggctgggaccgagtgagtgaggggggacaattttaggggatgagccagaggccagattatgtacggatttgcctagtttgtgagataagaaaccaatggaaggttttaaacagaggagttaatgtgatctgatagatattttttaacagattattttgactactgcattgagatatgggtatagggggctaaggattgaagcagggagtctgttgcaataatagcttagagataatattcaagatggtaacagggaatgcagtgagaggtggttggagtccagaattaattttcagagagaatcaacagaattgattgatggattaactgaaattaaacactaggagccatcactaaaaattctttctggatctgagaggagtaaaagcaagcaaattagtagatgggaaagtagcaacttgtagtgtcaagttatgataacatggtatattcttctagtttacggcatttttattgcttagagaactagatctcaagtttgctgggtagaaaactatagttcttacagaatgctagagaagttttgggtttatttcagttctgatactctacgggctgttaagaaactctaagttaatgacttcttgatggcaaaatctgaaagcctcatcttctctggactcttcactgattattttctagttgaaaactttatagcccttggctttgagaccccactgtcttctcattctcccacgtctttcaccgctgcttgttagtctatgtcttttgtttttctttgctcatcctctaaatttgaggttttcttgaaattttagtaccttgttcaacatgttcttcctcagtaatttcgtgtagtccagcactgcttgcacattgctgttctcagatctgtacctccagactctttcctgactttgagagctgaattttcagttgccttttggataccactcaatacattctaaactaaactcattagtttctcttatttccagctatactcttttttctgtatttcctatcagtttattaacattaccaatcaccttgtccctcttcactctctatccagttactgtccagtctatcagttctgcctatgaaattcctctttctttttccttatgccccacctgtcaccaccttgatttatttgcctgttgtttgtaattgggactactgaagcagatttctaactgtactcaatggttccagggagaagggtgaattagtatggtctctttttaacttaaagcagtcactatttgaaagctgtttttttttcatttatgtgcaaaaacaataatgcttttaaacattttacattttttatgtagtatttgttttcacttgtaaaattaggagaaaaataattatagctatagaaggccaatcaatggttactttaatctttttgctccactcaagggtcctttctcatttttatgattatctgagggagaatcaggataaatgagcgtataagattataaggaagacctttgataagtataaagataaagaacttaaaacataagatatcataagatacagtctactcattcaatctgtggaaggtcatttgtttttaaagcttgttattctataaacctaaagaccaaacgttcacagataaaaagatatttcaataaaataggtttccagactggggaatgtggtgaaatctcatccctacaaaaaataaaaaaattagctgggcttggtggcacatacctgcggtcttagctacttgggaggctgaggcaggaggattgcttgagcctgggaggaggtggttgcagtgaactgagatggggccactgcactccagcctgggcaacagagtgagactgaccctgtctttaaataaataaataaataaataaaaataggtttcctatttttacaagggaattaaaaaatgatgtatccaaatcaactttatcttgccatcttacttgagtcaaaacttgtttctaaagttatgatgattaacttgaataatttttttcctggattttaatcttttcaatagtatatatgaaattatagtagatattataggtatgtaatagtagtgtataattggaaaatgaatcaagtacagtgattctataaattgttgagtttttctattgtttgaggtctaaaattttctgctttttaatgttaggtataaaggagtcaaaaattatgttcactgccctaaaaacagtatttgaaaaaaaaaaagtttgtaaaactatttcccaggagcaaatcacctagcatgatttgattagtccttttctactgtaggcaaaactgatttctattgcctcaaacctcttctcagagaacacttaattgactatctgaattatttagcaacactctacctttctcattcattaattgcaaaaatatttttgagcccttactctatgccaagcactgctgtgtgtgccaggagatcagtaacgaacaaaacagaaaatgtttctgcctttgctgagcttacatttcagtggagggatatgaagaagttggcaaaatgtctttccctagtaactttaagttagatttccaattcagattctaaaagttctaaaataaagtcaaattaaaacctagataattatattaataactatggcacaatttagatataattacaatctcagtattatttcctaaatttggcataattctccatgttcttgttatacacctgattgctagatacaaatggaactgcatattcctgttagttcctcactttaaagtgtctttcttaagttataaacatcagtccctagccatagctttgtggagtagaactacttatgtataatcgaaaactgttatagtcaactaggtttttaatcaattaggttttcctccccatttctgcagctttactgacatacgataaactgcaacttcaaagtctacaatttgctgagtttagatatataatatatacctgtaaaaactaccatcataatcaagaaaacaaacatatatatcatctctgtacattcagacagctatttgtgtgtgtgttttgtgtacaatgttttgttataaaatatttcaagcacatgaaaatatgtaacagtgtttctaattctaattaatggcagaatgaaatggttggatgaagcctccagagattaacaattataaaatctggaaaactatttgaaggcaatgaaaagtgatcagaagcaggtagaaagtagggtttacctttaaaagaccatactacaatgagtaagaattgcaaagtttgtgatgttttcgcctgagggaattcccctatccctggatctcatatggcagaaaactgatagtcttattagctcaaagcagagttcagagctggcagagtggctgagaattaagggaggagattctagaagtacagaaaaggggagatccaaaatctaagtataagatctggtgaaatctgtgaccaagtactaaagtgcatttacataggaataacctaaatgagtctggtaacaacaacaacagccacaacaacaacaacaaaaacaacaaaaaagtaggcagaaatgtgagaggggcctacacttgaaaagcaaatacactggttaagatttctgtgtttgttgactgagtgtcttctgtgacctatgcatagctatagtggcagaaagttgaagttttagtggcttggattatcagatgacagagttgggagctgatagagcatatggaaacttataaagaaatctcatacgcaagagaattgcacagagagtgagccctgaaatctgagcataaattgtgctcaaatctttggttgtgtagtttgtttaaactgcacaggtacagaagagaccttcaaagggctatactaaaaggcatttgttggtagctgcaagaaccaagcagagagatgaggtgcttcactctatgggagagacaaaagcctagtttgagtctagtcaagttaactgcctattagaatgaaagctcagttatcatcacaagagcataacagtatccagagtcactacaacatgttatctacactgtctggtttttaacccaaaatcactagatgtggaaagaaactgaaaagtgtgattgatattcaagaaatgtatgattaatattcagttaataaaaaatgattctaattgggcccagatattagattgaataaagtctttaaagccactagtatgaatatgttcaaagaactaaaggaaaacatgttcaaataaagacaaatatgttttaatgagtgatcagatagggagccttaaaagagaactagtaactataaaaaaaaagaattaaatggaagttctcgagtgaagagtaccattttgcattcccaccatcaggtcaactaatctagtaacagtaggcctagcaaaggcctttacaccagcaatgaatgagagttcctgttgctctacattgttaccagcatttggtattgtcagtgttctggcttttggctattttaataggtgtgtagtgctatcttgtcttaatttgcatttctctgatatatgatgtggagcatcttttcaaatgcttatttgccatttgtatgtcttctttggtgaggtgtctgttaacgtctttgacccactttttaagttggattgtttgttattgttgagttttaagagttctttgagtattttggatagcagccctttattagatatttcttttgcaaatatctgtttttagataaaatgattatactggcactacatgttcagtggtaaaaatttgaaaaaatcactaaaggacaaagtaaaaattaaaaattatccatacacctaacacttggaagtaacaatggtaactttctggtttttaaaaaaatgtacatatagttttttttttttttgcacatatagttaatacatgttttttaaaataatgcatgaatggagactttcagtacctttgtttcaagtatttattcattaaacatatttttttctagtattaattgtagtggctatatttataaatctataatttcaaggtcatccaagaccacttttatatttagctccaataaatcctaagtcttgcttataactaatatgtctcagtgtcagataagtaacgtctgtttatgcagaagaaggcttttgggattataaaaactagagatggcagattccacctaaaggcattcagattcaaaaattttaaaaccactgtgttggccaaacataacacatcttcaggctctggccacctcagctctactctttcctaaaaaattagttgatgtctctgcaaaaataatggcctatttttctaatactttaagatatacataatttaaataaaactgggttacacagaagtctttactagatcatgccctattatattttatcaccttctaagctcttggtttgtctagctgggcaccatcaggtcagctaatctaataaaagtaggtctagcaaaggcctttacacagaacactcatacttctccctctccactttagaaaaaacttagatggctcatattaaccctaaaccactggacagtaggatgggtcagcacaactgttgatgtagtttttacaagatggaggcaacaaaatcaattttctgtgtcctgccatacctctatccacatgccaatgcaagcctatactatacatattttccctaacaaggtaaatttggggcaacatttctctttactttttaaaaaaattcttactcctgaaaatctttgctttataaaaaaagttattgtttataaatatagtctacattttattttttattttatgtcatacattgttttaatttgttatttattgttttatcttagactaagaagagtaaagattcagagacttctagattagaaagggtctcagagaaagtgatcttcatcatttataaaacaaattaattgattagtaccaccctagagatcatgaaaaaaaaaagaaactgattaattgaaaagtgacactgggtgtggtggctcactcctataatcccagcactttgggaggccaagacaggcaaatcacttggggccaggagttcaagaccagcctggccaacatggggaaaccctgtttctactaaaatacacagattagctgggcatggtggtgggcacctgtaatcacagctacttgggaggctgaggcaggagaattgcttgaacctgggaggtggaggttgcagtgagccaagatcatgccactgtactccagcctgggtgacggagtaagactctgtctcaaaaaaaaaaaaaaaaaaagaaaaaagaaaagtgtcactctgggtttggtcaggaaaacagagccatggtatgtattgaatcaatagggaatttaatagagaagtttggggttacatgactgtaggagaagttggagaaatgacgatctgtggtaggaaactcagtgaagccacctgaagccctggagcaggaaagaaagccatgcatgcattacagcgaggaagtctggacacctgcgtgtctgatcaccttccaaaaataatagtctttgcttcactggtgacttccaaatcttatgcaagttcttctcactggtagactgtcacctgaagctataggggaggggattttggggaatgtagctccaagccttagaagggactggtggtgatagtgccaaattaacgtggcacagttgcaaatccaattcatagcactcactcattctttaactcctacctttcttgatcttttcctagacccgaatgtatgtatgtttccatttgttattaagcaaccctggagtcttgatgtcttatactttttcattgaatcattttagattgcttcctacagatatagacatctttctaagagttattaaaaaataacactaatttcactcattcctatttcttgaactctaaacctgaggtaggttcactctgtaaacattgcttgtaccttattactcacttgagcaaagccccaggttgttagaactacaaacatgaatttcaccaatgatttagattcccaggcttagtaaagaaatatgtaaataaagactgcattaataattattctgaaatactgagaaatctcaatatttgcatttgctggatgctttgagactaaagtccacagtgagattacagaatagaatctgttttccagattgatagaggaaatgtttatatagcacttaacctgcttgtctaaagccagtgacctaaattctagactgtacctggttaaaactacccatgaataacaacccttacttaccttcctctttatcaacttatctatagatcatttgaaagaaagtctttcatagcaaagcagatgatgagtaattgaaatgcaactcagtatttttactaaatgattgttcgttgctttccaaacaactactttagaaaaacttggcagatttggaaatacactttttgaattctaagtggttgagaaatatgaattagctcacagaacaattgagtatgtgggtgataatattattttggagagtgttcttccatttagcagaaagatgtgtaaaatttaatagttgcggtacatgatcaaaattaatttgtaaacaatgaattttattgctaacagttttagtcgtgactcaaatataaattgtatacatgtgaatgattatatcttgtttttgggtcaataattctttaagttacattagttttataatgtggaattaactgctagtggatcaaagttatgtaattatttaccttggacctcaatacacaaaatttggcatgctaagataatatctgatgatgctagttgtaagataacatcagtgagtaagtgggtaatactaatgggtccactagttcttgtaagacaggtaagtaaaaaaaattttttttctctaaacatgttagtcaagcctagcgttagctgaaagactggtagtgaattcagaattattttcaaagtacaatgtgagctcattggatttactgaagaattattttgggctttaagatttcatgtgctgtttgaacacagcagagaacatgtagattttcttcagtgatacatgaaaatatccactttaacaggtaaatattgggaagatggattcacccattgaaaagtggaacctaataattggcaacttggctttaaagcaggtaagtggtacacatatttgtttacagatcttgggtgtacaaattttgactgtaatctataagattggtgtaaattttagtactatgagtctaccctttaattgttttcagaaacaccaaaacaataatttagtaccttgaaaaagtgatggaataaatggatacctatgagctctgaaactattcgttgtttagaaactagtttttacaaatatgaaaaatatatacaaaatgtggaaaaatatacaaaatattttctatcataagtgtgtgatagagccagaatttgcattaatatatctgtttagtaaatatttagcacttcattaagtgctattttttactttgatatttaaagataaactgagctcttttctatatattatgatcagatatttgtttgttttccttaatttgttagttactagtattaatataaacaatacagtagtttaccaattacacgtacactgaattgtgaactgtagatcgtgtataatctacagctttttctaatcttagatgagtttctctttttcttctgccttcaccctctcctacccctaagactgaagactgcgactacccctagtaattctctagctagtgtgagcttagggaatgcacactaattttggtattagttcacctaggacataatgttgagaacctggttgcaggaacagaatttcatgtaatgtaattcaaggacaaagaaataaagcacattttttgaatacgtgtacaagtgcttgtaagatcacagatgtagaaatgagaaaatctgagatctgacctcagctgtaacattaaacagtttataacctttgttaatctatttaacttttctgggcttcacttttctcttttatttatttttttctttgaaatacatttttcctttatttattttttttttttgaggcagggtcttgctctgttgcccagggtggagtgcagtagtgcagtcatggctcactgcagccttgacctcctgggctcaagtgattctcccacctgagtgcccgagtagctgggactacaggtacgcgccaccacgcctggttaatttttgtactttttgtagagatggggtttcgccatgtagtccaggctggtcttttctttcaatttttaatttttgtggatacgtagtaggtgtatatattcatgagatgttttgatacaggctgcagtgcataacaattacatcatctaaaatggtatatccatccccccagcatttatcctctgtgttacaacaatccaattatactcttgtagttattttttaatgtacaattacattattgactgaagtcaccctgttatgctatcaaatactaggtctcattcattctatttttttgtactcattaaccatccctacctcccccataccctcctactacccttcccagcctctagcaaccatccttctactttctgtctccatgagttcaattgttttgatttttacatcccataaataagtgagaacatccaatgtttgtttttctgctcagcttatttcagttagcataatgacctccagttccatctatgttgttacaaatgacagatatcattcttttttatggctgaatagtgctccattttgtataagtaccacattttctttatccattcatctgttgatggtcacttagtttgcttccaaatcttggccattgtgaatagtgctgcaacaaacatagaagtgcagatatctcttcaacatactgatttcctttatttgggattatatactcagcagtaggatttttggatcatatggtagctgtatttttagttttttgaggaacttccgaactgttccccatagtgcttgtactaatttacattcccaccaacagtgtacgagggttcccttttctccacatcctcaccagcatttgttattgcctgtcctttggataaaagccattttaactggggtgagatgatatctcattgtagttttgatttgcatttctctgatgatcagtgatgttgagcaccttttcatatgactgactaccatttgtatgtcttcttttgagaaatgcctattcagatcttttgcctgttttaaaatcagattattggattttttttcctatagatttgtttaagctccttatatattctggttatgaatcctttgccagatgggtagtttgcaaatattttctcccattctgtgggttgtctctttactttgttgattgtttcctttgctgtgcagaaagttttaaacttgatattatcccatttgttcatttttgttttggttgcctgtgcttgtgggatattactcaataaatttttgcccataccaatgtcctggagagtgcccctaatgtttttgtgtagtagttttatagtttgaggtcttagattcaagtctttaatccattttgatttgatttttgtagatggtgagagataggggtctcatttcttctgcatgtagatgtccaattttcttagcaccacttgttaaaaagactgtcttttcctcagtgtatattcttggcacttttggcaaaaatgagttcactgtagatatatggatttgtttctggtttctctattctcttccattggtttgtgtctgtttttatgccagtactgtcttttggttactatagctctgtagcataatttgaagtcaggtaatgtgattcctccagttttgttctttttgcttaggatagttttgactattctgagtctttttgtgatcccacataaatgttaagattttttttttctatttctgtgaagaatgtcattggcattttgatagggattacattgaatctgtagattgctttgggttatatggacattttaacaatattgattattctaatccatgaacatagaatatctttacactttttggtgtcctcttcaatttcttgcatcaatattttattttattttattttattttattttattttttttttgagatgaggtcttgttctgttgcccaggctaccaggctagagtgcaatggcgtgatctcggctcactacagcctccgcctcctgagttcaagcaattctcccacctcagctgggattactggggtgtgccaccatgcccagctaatttttgcatttttagtagagatggggtttcaccatgttagccaggctggtctcaagctcctgacctcaggtgatccacctgcctcagcctcccgaagtactgggattacaggtgtgagccactgctcccggcctgttttatagtttttattatagagatctttcatgtctttggttatttctaggtctatcttattttacttgtagctattgtaaatgggattactttcttgatttctttttcagattattcactgttggcatatagaaatgctactgcttcttgtgtgttgattttgtatcctacaattttactgaatttatcagttctgatagttttttggtggagtctttaggtttttccaaatataagattatgtcatctgcaaataaggataatttgacttctttctttccaatttagatgcccttcatttctttctcttatctgattgctttagctaggacttctagtagtatgttaaaaaaacagtggtgaaagtctctttcctcttttaaatatcattattgtattagagatgtctaagatctttttcagcttgaaattgtagaaatctatgcaggggtaataatcaaaacatttaacaaccagtagagttgttaaatatatatataaataatatataaaaataatataaataatatataaaatttgaaaatatattccatttatttttaaataccctgaactcttacaaagtaatatgagttgtagtataaattatttgtcaaattatcctaataatttccatctcagcttttcatttttcctcccattctttgtcttcacttttcctttatcatcctctctccctgcaactgtcagtcaagataggagtcagacatggctagggattcactgattctagttgccatagcccaaagcctgtgtctttatgtgccttactccaccaagaaagtgtgaagaacagggaaccccaaccaggcccctcaggacacacctggtaccagccagtgaggcagcaattggttgaagcccagtcacaagtagacaaaagtgagaagaaaagaagatggagcggtgggggtaatggttgggggagagggttttttcttcctgaggcttcttctgctaacacttgtgaaagagtagatgatgagtgtgggaggggagtaggatgggctggcacaagcctcctctgcctggagactggccatggagggtagaaagagagaagggtagaaagcacagacgaggcccacactcccacttgctcagggttgtgctcttctcactgttaaatggagccccaggcagatcgcctgtcacagatttcttcacgattgtacagaatggtcttctggaccaaatacatacataagtagtcagataaagcaaagtctccagtcccacatgaggaactgttgcctcaccaggagggacgtgtcctgtaccaaacatctcttcaggcctatggcccctgttaaccttcacatctactacttaaacccagactttgctttctcttgggtacaattagtcatttttcagttagtcattattttgcatatttccagaataggacttcctcatctcagctgtgtgcttttattttctcagaaattgacagatttatatatacatatatacacaccatgatgtctgcagtaggttctctagctctgtgttccaatgtcaagccagacaggacttggaatcatagtgctagaatttatattataaattaattttactgctttaaagtgtaattacatcatttactaaccagaatgaaaatcctgaaatattttaactgctacactcatcatggtgcttattggtttgaatctcagctctgtatctgtggatgacatccacagaagctgtaatattaatacaagatcatggggctggagtccaggatatatggtctctttagtcctggctcttctgttgatttactatatgactacttcaggaattttttacttggagccctcgattccagcacgtggattggcttcagagagtccatgaacatcaagaaattctactcaaaatattgagtgcctctgtgtttgcctagagaaagagaactctattctatagagtttttaccagattgtcaaaggagtccatgacacaaactcagctaagagtgagtgcaatagatgattcttgtagggtttcttttagttctgacatcctattaatctgaggctgagttagcggtgagtgttatttcttagtggcaggttttttttattcttgctttgtgtcagcactgtggaaagcagtttatatatttatataattaatttaaatcacaaagtttgaggttattgtggtcttactgattaggaactgaaattttcatagcactaatcacaattgtgcttatttgtgaggttattttcaaatgtttgtctctcccactgaccaagagctctgtgagggcagggaataatctacgttgaccactgctgtagcccaacacaaaacatagcacattatacatagtagaatctaaataaatactccttgaatgaatgagtttaaataatttgctacaagattaagtgctagaaccaggagtcaaactcctatctttctattataaaatccaatctcttgccagcactacctctagagtcagacttcagatgtgtggattgggtacttctcagtctgaaggtggcattttcttaggtgatctattagttataccatcagcatcacttggggtgcttgttaaaaacagattcctggactccgttccatacttgtcaccagatcatcagagcagtttgagaacccaccatcttagggaatattaaaaccaaaatatagtaactactctaaaaggtaatgtagctcaattattacatgcaatactttttttgactttttgtagtaatatttacataatcaaaatgtttaaatgtgtttttaaagtgaataattcagttggatttatgaaaaaaattttaggttcaggcaacagtagtgggttttctagcagctgtggcagcaattatattgggctggattccagaaggaaaatattaccttgatcattccatacttctgtgctctagcagtgtggcaactgccttcattgcatctcttctgcagggtaagtgaatttataaatgtctactctatagccttttacatttaaatggtttatttcttaagatgactatttttatttaaatgatacctgttatgaaaacaacagaaaaaacatatctacaaacttaaaaaatgccttagttattccagatatatttacatttcattatttataaaacttagtgtagaacaggcttttctgaggttgtctcctggccttggatactccgttatagttcctcaaaaagatcaggaaaatcgcctagacattcatttgtttctgtaagttaaataaattgggaaactcctttctggacatcatgcaggggatttactagcttgtcacttgagtaacaagtgttccaggaattctgggtttcaaaagtcatcctctgttgaaatttttttgtttcagatttcaagaaaaatttcttccctgtttctgtggcaatacaaatataaccttatacttaagatagcatattgttggctatagaatttaaagagccagaaggttttaaaaattaactactttagaacttttatttgggttatttttctttatatttattcgtatgaactttacactagagaattagcttattgtggaatcacaatcataaagactttgttctttttattttataattgccattttcttgcccttatatcaccagcaaagtttaaagtggattattgtcatgttaggtgatcatacaatgcagctaacttttttggctaggttctgggaatttagggaatcttattaaaattataactcgatttccaaaatattttcaagcattttgttttagtagtttaattgtatcggggtagtttcttgtcttcataaagaattactatagttgaatggagttaacattgaccaaagcagagtgaagttaagctattggaaaattaaattgttggtacaaaaataattatgccatcagcatgctatttttttaggctcatttgcttcttttttctttctgattttatttcatttagaaagtgtcatttaaaatttttcagtctaacaagtatttgaaagcttttcaaaactatccaaaattcagaattttaaaaagtatttgtttaaagcttctgactttgaataatgtgtgttctaattttatgataacttgacctttataagcactttagtatatgtaaagtagaaactcttagccatatttgtaggtgagaaaacttaggtaaggtgacttgtccaatctcatcaacttgttaccagctgaatcagaactaaaacacgtttcctaactcttagctctttccactggactatgatacatacaaaatatttgttttcagttgaaaagatatagatggtactatgtgtaggagaacttcccatatacatcttcaaatgtgctgattttggaaaaagattctaagcgattacatcttgcctgattattgcataatgtattttttttaaaaagttttctgctatagctttttttctttttcaatgatattatgggaaaggtaagtctagtaatttaaaaagcctccagaatactaaaatataaggcactgtttgatgcaagacaaaaattctgcttattaaaattttggctttaataggtagagtaaaaaacactgggctagagtcacaagctatgtgactttaggcaagaatttaagccctactctacaggacctcagttttattatctataaagtgagtatgctggaacaaaaacatttagagtcattttaactctaaaagtgctgtgagattctgttactgtttttctccatagccatatttaggctttcatattgatttgtggttagcacatttaaagttttctctttactacatcctcttaatgagtatcttggtgtgacaaaatctacacaatttagagtggatataaatgttaatagttttatcccatttgtataatttaagaaaattaggatgtaaaagtacaagtacacagttaaattttcatcttctattctctcgtaggtttatagacagaaacttcaggtttaaagaatatcttttacaaagactgtttcttgtattctggccttcagtgttttaaaatttaattatgtcctgctgcttaatacttcaacgtctttaagtaataaaatgaaataagcatttctagctgccatatgtgaacaaatctggttttgttggccttcttcccagttgttgtacatatacatatgactcacctttttttttgatgttttcatactttatttgagggttaaaattaaaacctttggattcaatacacacaaatacattatatctaagatatacatgtcactaaatctgaaattttagctttaccataattttagtagctttcaggcctctaaatacaatgctgaacttcttaaattttctatgatccccacttggagtttgttgaaaggcattttgccaaagcgttagagtaaatgttttgtttgctttagtcagcttatctaagcagtctaactggaattgatatgctgtttttctatcctacacattttggtatttgggggattgattttctttaaatcatagcctaaaaagtaatgaacattctttcttctaggaataataatggttggggttatcgttggttcaaagaagactggtataaatcctgataatgttgctacacccattgctgctagttttggcgaccttataactcttgccatattggcttggataagtcagggcttatactcctgtcttggtaagttgatttaaaactaaatattgtgtgttgtctcaagtctctttaaataaatattgttgcagcaatgccatgaatccatggtagccttcatttgcattagaactgctgttgagactgattaggataactatcatttgttttatacctactatgtgttatgattcccactttcttttttctcgtagagtttaaaactctgtaaaataaggattatcatctctaattttagatgagaaaagcaaggatcatagaagttatgtatgttacccaagtttatataactactagtaaaaaagttgaacacaggcttatcatattttgtgatttctgtcctttcctgtaagtgtacagcagctaggagtcaacctgcagtgttctctgtatagaaccatctcagaatataagcttataagtggtacttaaaatttaccaatggaatgtttttccccatcagaaacccacaccaataagtagcttcatggcagttaacaaaagggaaaaaaaaatcaccacaaaaattagactgaatgctgtataaagttggagccatatatgtaattcctgataaatagtgatagagtatttatggaatctaatgagttgttttaatgcaaatttgtgttctggaaatggtaaatacatatgatttgtgagtgttgatgacatgctaaaagttcattgtggttttattatttttagatgccaaattaaggaaaacagaaacttacagtaatacaagaaaaaaacatgagtatataagccaagccagaggcaaacatttattcacaaatcctcacatatgttcatggattctatacagatttatggtgtactttaaaataaatctaaagcatgtttcgttttaagaagtaagggtctcagatatatgttcttgaaataaagaaagggctttaaccaaccaaaggcaataattttctgtgacttttggagacatcaaggaagcttcacttagcatataaaattgccttaagttatttagtgagtggcataaaaacaatatttaataagacttggtgtgtatgttcaaggaatatttctctcatttagaagataaggttgcatccactttaagtgaggtataagacaagaaatgatcaatggcctaaatgtaagctcttgttcccaaaggtcttggcttttttatgttgttgtgcaatttgcaaagaatgatacatgtttaagtatattaaggacaacacttaattcccttccctcccactcaaaaaaaaaagcacaggaagtgggttatgttattaaagggataatcttaaatttgctctaatttgtattgtttggatgataaattgataatactttaatttagaaatagatgctgaagtcagggattaaaatattagcttatggctagcattagaaaatgtggcttaatattcttgtcctactctattaaactcacccacacactctcagccagacagttggataacttgtagtcctgaccccatagaataagctgttaactgtattggtgaagagagactgtcactaataggctgtatctcaaaagagaaagccagtaacggcatgagttaggcatgagttagtgcccctttccctagtattactaattagataagtctctcccaattggaggaggaggaaagagagaagaaaagaggggtagaagaggataaagggttatgtctcaatatcattaaaaggacagaaattctatgggtttgcccaggaacatagagggtgggggtagggatggagggctggtagtggttctgggacaggttaccctatatacataaaaaatacaggtatacagttccaagatggccaaatatgaatagctccagtctacagctctcagtgagcgacgcagaagatgggtgatttctgcatttccaactgaggtactgggttcgtctcattgggactggttggactgtgggtgcagcccacagtgtgtgagccgaagcagggtggggcactgcctcaccagggaagcgcaaggggtcagggaattacctttcctagccaagggaagctgtgacagatggtacctggaaaattgggacactcctgccctaatactgcacttttccaagagtcttagcaaacagcacaccaggagattatatcccacacttggcttggtgggtcccacacccatggagccttgctcactgctagcacagcagtctgagatggaactgcgaggtggcagcgaggctgggggaggggcgtccgccattgctgaggcttgactaggtaaacaaagcggctgggaagctcaaactgggtggagcccaccacagctcaatgaggcctgcctgcctctgtagactccacctctggaagcaggacatagctgaataaaaggcagcagaaacttctgcggacttaaacgtccctgtctgacagctttgaagagagtagtggttctcccagcacggagtttgagatctgagaacggacagactgcctcctcaagtgggtccctgacccccaagtagcctaactgggagacatctcccagtaggggccaactgacacctcatacagccgggtgtccctctgagatgaaacttccagaggaaggatcaggcagcaacatttgctgttgtgcaatatttgctgctctgcagcctccgctggtgatacccaggaaaacagggtctggagtggacctccagcaaactccaacagacctgcagctgagggtcctgactgttagaaggaaaactaacaaacagaaatgaatagcatcaacagcaacaaaaaggacatccacatcaaaaccccatctgtaggtcaccatcatcaaagaccaaaggtagataaaaccacaaagatggggagaaaccagagcagaaaagctgaaaattctaaaaaccgaacgcctcttctcctccaaagattcacagctcctcagcaatggaacaaaactggatggagaatgactttgacgagttgactaaagtaggcttcagaagattggtaataacagacttctccaaagtacaggaggatgttcaaacccattgcaaggaagctaaaaaccttgaaaaaagactagatgaatggctaactagaataaacagtgtagagaagaccttaaatgacccaatggagccgaaaaccatggcatgagaactacatgatgcatgcacaagcttcagtagccgatttgatcaagtggaagaaagggtatcagtgattgaagatcaaatgaatgaaatgaagcaagaagagaagtttagagaaaaaagagtaaaaagaaatgaacaaagcctccaagaaatatgggactatgtgaaaagaccaaatctacatttgattggtatacctgaaagtgatgaggagaatggaaccaagttggaaaacactcttcaggatattatccaggagaacttccccaacctagcaagacaggccaacattcaaattcaggaaatacagagaacgtcacaaagatactccttgagaagagcaaccccaagacacataattgtcagattcaccaaggttgaaatgaaggaaaaaatgttaaaggcagccagagagaaaggttgggttacccacaaagggaagcccatcagactaacagtggatctctcagcagaaactctacaagccagaagagagtgggggccaatattcaacattcttaaagaaaagaattttcaacccagaatttcatatccagccaaactaagcttcataagtgaaggagaaataaaatactttacagacaagcaaatgctgagagattttgtcaccaccaggcctgccctaaaagagctcctgaaggaagcactaaacatggaaaggaaaaaccagtaccagccactgcaaaaacatgccaaattgtaaataccatcgatgctatgaagaaactgcatcaattaatgggcaaaaaaaaccagcgaacatcatgatgacaggatcaaattcacacataacaatattaatgttaaatgtaaatggactaaatgccccaattaaaagacacagactggcaaattggataaagagtcaagacccatcagtgtgctgtattcaggagacccatcttatgtgcagagacatgcataggctcaaaataaagggatggaggaagatctatcaagcaaatggaaaacaaaaaaaaaagcaggggttgcaatcctagtctctgataaaacagactttaaaccaacaaaaatcaaaagagacaaagaaagccattacataatggtaaagggatcaattcaacaagaagagcttacagtcctaaatatatatgcacccaatacaggagcacccagattcataaagcaagtcctgagagacctacaaagagacttagactcccacacaataatagtgggagattttaacaccccactgtcaacattagacagatcaacgagacagaaagttaacaaggatatccaggacttgaactcagctctgcaccaagtggacctaatagacatctacagacctctccaccccaaatcaacagaatatacattcttctcagcaccacattgcacttattccaaaattgaccacatagttggaagtaaagcactcctcagcaaatgtgaaagaacagaaatcataacaaactatctctcagaccacagtgcaatcattagaactcaggattaagaaactcactcaaaaccgcacaactacatggaaactgaacaacctgctcctgaatgactactgggtaaataacgaaatgagggcagaaataaagatgttctttgaaaccaatgagaccaaagacataacataccagaatctctgggacacatttaaagccatgtgtagagggaaatttatagtactaaatgcccacaggagaaagcaggaaagatctaaaattgacatcctaacatcacaattaaaagaactagagaagcaagagcaaacacattcaaaagctagcggaaggcaagatataactaagatcagagcagaactgaaggagatagagacacaaaagaacccttcaaaaaatcaatgaatccaggagctggttttttgaaaagatcaacaaaattgatagaccgctagcaagactaataaagaagaaaagagagaagaatcaaatagaggcaataaaaaattataaaggggatatcaccaccaatcccacagaaatacaaactaccatcagagaatactataaacacctctacgcaaataaactagaaaatctagaagaaatggataaattcctggacacatacaccctcccaagactaaaccaggaagaagttgaatccctgaatagaccaataacaggctctgaaattgagagaataattagtagcttaccaaccaaaaaaagtccaggaccagacggattcacagctgaattctaccagaggtacagagaggagctggtatcattccttctgaaactattccaatcaatagaaaagagagaatcctccctaactcattttatgaggccagcatcatcctcataccaaagcctggcagagacacaacaaaaaaagagaattttagaccaatatccctgataaacattgacacaaaaatcctcaataaaatactggcaaaacgaatccagcagcacgtcaaaaagcgtgtccaccataatcaagttggcttcatccctgagatgcaaggctggttcaacatatgcaaatcaataaacttaatccatcatattaacagaaccaatggcaaaaaccacatggttatctcaatagatgcagaaaaggcctttgacaaaattcaacagcccttcatgctaaaaactctcaataaactaggtattgatgggacatatctcaaaatagtaagagctatttatgacaaacccacagccaatatcatactgaatgggcaaaaactggaaacattccctttgaaaagtgtgacaagacagggatgccctctctcaccactcctattcaacatagtgttggaagttctggccagggcaatcaggcaggagaaagaaataaagggtattccaataggaagagaggaagtcaaattgtccctgtttgcagagggcatgattgcgcatttagaagaccccattttatctgccccaaatctccttaagctgataagaaacttcagcaaagtctcaggatacaaaatcaatgtgcaaaaatcacaagcatccctatacaccaataacagacaaacagagagccaaatcatgagtgaactcccattcaatctctttgcatcaaagagaataaaatacctaggaatcaatctcaattgcttcaaagagaataaaatacctaggaatccaacttacacggaatgtgaaggacctcttcaaggagaactacaaaccactgctcaacaaaataaaagaggacacaaagaaatggaagaacattccatgctcatggataggaagaatcaatatcatgaaaattgatggggatgccattcccatcaagctaccaatgactttcttcacagaattggaaaaaactactttaaagttcatatggaaccgaaaaagagcccacattgccaagacaatcctaagccaaaagaacaaagctggaggcgtcatgctgcctgacttcaaactatactacaaggctaaagtaaccaaaacagcatagtacttgtaccaaaacagagatataacccaatggaacagaatagagccctcggaaataataccacacatctacaagcatctgatctttgacaaacctgacaaaaacaagaaatgggagaaggattccctattcaataaatgatgctggggaaactggctagccatatgtagaaagctgaaactggatcccttccttacaccttatacaaaaattaattcaagatggattaaagactcaaaccataaaaaccctagaagaaaacctaggcaataccattcgggacataggcatgggcaaggacttcatgactaaaacaccaaaagcaatggcaacaaaagccaaaatagacaaatgggatctaattaaactaaagagcttctgcacagcaaaagaaactaccatcagagtgatcaggtaacctatagaatgggagaaaatttttgcaatctacccatctgacaaagggctaatagccagaatctacaaagaacttaaatttacaagaaaaaaatcaaacaaccccatcaacaagtgggtgaaggatacgaacagacacttttcaaaagaaaacatttatgcagccaacagacacatgaaaaatgctcatcatcactggccatcagagaaatgcaaatcaaaaccacaatgagataccatctcacaccagttagaatggcggtcattaaaaagtcaggaaacaacaggtgctggagaggatgtggagaaataggaacacttttacactgttggtgggagtgtaaactagttcaaccattgtggaagacagtgtggcgattcctcaaggatctagaactagaaataccatttgacccagcgatcccattactgggtatatacccaaaggattataaatcatgctgctataaagacatatgcacacgtatgtttattgcagcgcttttcacaatagcaaagacttggaaccaagccaaatgtccaacaatgatagactggattaagaaaatatggcacatatacaccatggaatactatgcagccataaaaaagcatgagcccacatcctttgtagggacattgatgaagctggaaaccatcattctgagcaaactgttgcatggacagaaaaccaaacactgcatgttctcactcataggtgggagttgaacaatgagaatacctggagacagggtggagaacatcacacaccagggcctgtggtggggtggggggacgggggagggatagcattgggagaaatacctaatgttaatgatgagttaatgggtgcagcacagcaacatggcacatgtatacgtatgtaacaaacctgcacgttgtgcacaagtaccctagaacttaaaaaatgtatatatatatatatatatatatatataaaatacaggtatattatttgcagatttggatatttaaattaccattaagtcatttataacacatttttcagctgcttgcaaataccagatatctcctcagttaaagacagtggtaagaaagtaagaaagagaatgccgttgaagaatgttatcatgataaacatggcaattgttataatgttacagaattaagtactatgagattccagaagataaacaactattgaggaaaataatgcacactgacctttacaattttatttaattaattaattaattaattaattttttgagacagagtcttgctctgtcatccaggctggagtgcagtggtacgatcttggctcactgagacctctgcctccggggttcaagtgatggtcgtgcctcagcctcctgagtagctgggactacagctactacaagcacacgctaccatgcccggctaattttttgtatttttagtagagacggggtttcactgtgttgcccagactggtctcaaactcctgagctcagggaatctgcctgcctcggcctcccaaagtgctaggattacaggcgtgagccaccacgccccacctgaaattttatttttttaaattatacaagggataaactctccttataaaagacttaatcataatgtgttgccatctaaagctttcggtatttcgaatgttatatagtgatgcatacataatttgactggatcaagaaataaaaaaagtaaaatggaatgttactatcacagatcatgattttgaaaaataatattattaaatattgcttaggattttctaatctttgtcttctgaaagttggctcaaagtaattcaagatgaattaactaaaatagtcttttacattttttctgtatcattgattctcctaaaaatatattttttgtgttacagatcaatcccatagttaatttgttaaaggtatttctaaagtgtctgtgttcagattgctaaagtgtctgctctgtgcgcactagggggcctcctaagatcagcagttggatgcctaatatttttattctgaatacaaagattaggaacaggcacatttaaattccaagactccattcatcctgctgagaagcttcaggtttatttcctgataaacttatagttcaagtttatttcctgaactatattgaaaacacttagcagtctttagagataaaaagaggattttatgatagcagtaggctttagttatagaggccatgtattatatagtgctcaaagaactggacattaagaaaagtcttatggtctcaattcatcaagaagatataacaattgtaaatatatatgcacataatatcagagcacctaaatatatatatgatcaattgttaacagatatgaagggggaaatagacagtaagacaatagtagtaggggacttcagtaccccactttcaacactggagagatcatccagacagaaaatcaattaggaagcattggacttgaactacactttagaccaaatgaatctagcagatatgtacaaaacattccatccaacagcagcggaatacacattcttttcaagtgcacgtggaacattatccaggatagatcatatattaggccacaaaacaagtcttaacaaagaagactttgagaagattgaaatttaagagactgaaatcatatcaagtatctttgatgatcacagtggtatgaaactaggaatcaataataggaaaaaaactggaaaattcaaaaacatgtggaaattaaacatcatgctcctgaacaaccaagaggtcaaagaagaaatccaaaaggaaattaaaaaaatatattgagacaaatgaaaatggaaacacaacataccaaaacctaagggacacagcaaaagcagttctaagagggaagtttatagcgataaacacctgcatttagaaagaagaaagatctccaataaacaagctaatgttacacctcaaggaactaggaaaaaaagaataaagtaaacccaaagttagcagaaggaaggagttaataaagaccagagcagaaataaatcaaatagagaatagaaaaatacattaacaaaacttagttggctcttctaacatataagagtgacaaagccttagctagactaagaaaaaaaaagagaagactgaaattaaaaaatcagaaataaaagtggagacctcagaaataaaaaagatcactagagacgattgaacaattttaagccaacaaattagataacctagaggaaatggataaattcttagaaacatatacctgccagaattgaatgaggaacaaatagaaagcctgaacagaccaataacaaatagttattaaagtagtaattaaaatcctcccaacaaagaaaagcccagaaccaaatggcttcatggctgaattctaccaaacattcaaatagtaccaatccttatcttccaaaaacatagaactagaggaaatacttccaaactcatttatttttatttttagttttattttcagagatgggggtcttgctctgttacccaagctggagtgcagtggcatgattatagctcactgcagccttgaactccttggctcaagcagtcctcccacctcagcctcccaagtatcaggaactacaagtgcatataaccatgcctggctaatttttaaatattttgttggagacagggtctcactatgttgtctagtctggtgtcaaactcatagtctcaaacagtccttctgcctcagcctcctgagttactgggattacaggtgtgagccactgcacccagcccagactcattttataaggtcaccatcacctgataccaattttccagacaaagacaccacaagaaaacaaaactagtgaggtgtggtggcacataccagtagttccagctactctggaggctgaggtgagaggatcacttgagcctgggagttggagtcctgcctgggcaacatagtgagaccccatctctaaaacaaaagcaaagacaaaaatgacctaaacaacaacgacaacaaaataaatgaaaactataggctaatatttctgatgaacacagctgcaaaaatcttcaataaaatactagcaaactgaattcaacaatacataaagaatattatacatcatgaccaagtgggattcatcccagggatgcaagtatggtttaacatacacagatcaatcagtgtaatatagcacactgtgttaaataaaatatctagaaataactttaacaaaggaggtgaaatatctctacaataaaaatgattaaacattaatgaaataaattgaagaagacacaaataaatggaaaggtattccatgtttatggattggaagaattagtatcatccatactacccaaagcaatatacaggttcagtgcaattcctatcaaaatttcaatggcattcttcacagaaatagaaaaaagaattctaaaattcatatgaaaccacaaaagaccctgaatagccaaagcaattttaggaaaaacaaagttggaggcatcacacttcctgatttcaaattatgtcacaaagctatagtaatcaaagcagtatagtactggcatgggaacagacagtggaacaggatagagagcccagaagtaaacccaagtatatacagtcaaataatttttaacaagggcaccaagaagacacaattgggaaagaatagtctcttcaataaatggtgttgggagaatggatatccacatgcaaaagaatgaaactagacctttatcttacacatacacaaagatagttatcttacacaactaaaaatagattaaagacctaaacataacgcctgaagccatgtaactcctagtagaaaacataggagaaaagctccttgacattgactttggcaatgattttttggatatcacatcaaaaaatcgggcagcatttggctgggcgtgatggctcacgcctgtaatcgcaggactttgggaggccgaggcgggtggatcacgaggtcaggagatggagaccatcctggctaacacggtgaaaacccatctttactaaaaatacaaaaaaattacccgggcagggtggcaggcgcctgtagtcccagctactcgggaggctgaggcaggagaatggtgtgaacccgggaggcagagcttgcagtgagccaagattgcgccactgcactctagcctgggcaactgagcaagactctgtctcaaaaaaaaaaaaaaaaaacaaactcaggcaacaaaagtaaaaataagtgagactacgccaaatttaaaagtttctacacagcaaaagaaacaatccacaaagtgaaaaggaaaaggcatcctatggattgggagaagatatttgtgaaccatatgtttgataaggagtcaatatccaaaatatataaggagctcacataactcaataaaaaacacataacccaatttaaaactgggcaaaggacctgagtagacatttcccccaagagcacataaaaatgacgaacaagtatatgaaaaggtactcaatgtcactaatcatcagagaaaagcaaaccaaaactgaaatgagatatcatttcacatctgttataatggctattaccaataagatgaaagataacaagtgttggcaaggatgtggagaaaggggaatccttgtacactcttggtagaaatgtaaattggtgcagttttatggaaaacagtatggaggttcctcaaaaaattaaaaatagaatgactgcatgactcagcaatctcccttttgggtatgtatccaaaggaaatgaaatcagcccttcacagagatatttgcactcccatgtccattgcagcattatttacggttgtctagatatggaaacaacctaaatgttcctgatggatgagtaaataataaaattgtagtatatatacaatgtaatattgttcggtcttaaaaaaggagaatccgccatttgcaacaacatgaatgaacctggaagacattatatgtcaagtgaaataagccagacacagaagtaaaaatactgcatgatctcactttatatagagaatctttaaaaatatgtcagatacataggaacgaagagtagaatggtagttacgggggatgggggttaggggtggaggtgaggcaggaaatggggagatgtagatcaaagactacaaagttgcagttatgtaggatgaaaaaaatctagagatccaatgaatgtacaacatgaggactatagttataactagaagtttgccaagacagtagactttagatgtaattaccacaaaaaagtggaaagaggttaaatatctgagatgatggatgttaaatcactggactgtagtaaccacttaactatatatctaaccatgtaactgtaatatgtctatgaaaacaccaagttgtacaccttaagtatgtatcaaaaaaagaaaaaagtcttattcaactacttagaattctgagtattctgaaatgactgaataccccctcatgtgctgttagctttcatacatgtactaaggctctctgcatccatggaattcaatgtgtgctacttttcttttttttcttttggagacagagtcttgctcgactgtcgcccaggctggagtgcagtggtgtgatctcggctcactgcaacctccgcctcccaggctcaagcagttctgcctcagcctcccaagtatctgggattacaggcacctaccaccacacctggctaatttttgtattttagtagagacgggattttgccatcttggccaggctggtcttgaactcctgatctcaagtgatccacccgtgtcggcctcccaaattgctgggattacaggtgtgagccaccacacccagctaaagtgtgctacctttcttttgcttctgctgaaatttgctgatttctgctatctgaagtaaatatgcaattttcccccttttcctctccactcctccaaaaaagagtgaaacaaacaagcctaaagctttgtttactccaattgactttattttttgtagtcatcctgagtaactctttattgcttaatggacaaagttaaagtttttaccctggtatttaggcctcgcggagtcagttggaaacttaccttcttaagcttctgcctgcttctcctgttctataccttttactccagccaaactcagctgtttactgatctcatataccatctgttttttttttccttcttattcccctccctcaattcattcctcattcccctctcccagttcatcctcttcttcccatcaaggccaatccaaatccttctcatttttaaagcctacatttatagattttcctagtcttaagtgatcttttttctcctctgaattcctataacacttaattgacacttctcttgtgacatgtttaatgtgtggctggtcattatagctttttctataaatgttataccttctcttatgaggatataagcttcttaaggacaaaactgcgttcttattttatttctttgtagcaccctatagtgccatatacaaaacagatgtttaataaacagtacttcaccaaatgctttattccttttgaaagcactccaattaacgtgattagaagttattcagaatgattttggcacagtaattgtccaataacataatagattgtaacaaaaaatcattttgatgaggatatagtattggggaaatattggaaggatatcttagcagaaagtatctgggaattagtaccactatagaaaaataaaaatggcaacacatggctagaaaagatctatttcaaatggaaatagaaagttcagagagtaatctaagctctggattctgatatacttttgtgtggcttgcagggacaatataaaggcatttatacattcgtatagtaatctttaaacatacagtaatctttaaaagctattaacaagattcaacattgggccagtaactggaatatatatatgttcacatgattgttgctcctttctttctgtttgcataagttccaagaagatttaaaaaattctttttcacatatttataactgcatggctatctaattcttgtgtgtacatgatatttattgatttgaaaaaattattagatattctctttgtaggcgagatctgagaggcaaaatgttgattgatttttcatttttcaagattaactttaaacagatggcttagctgaagctgtaagagcagtagcaattagcctcaggttactgcattcctatggagactaacaaggatgccacctggttatttacagaccattctagaatatctctgccttaatgtggtggtgtgagtagaatctaaatttatcttgaatgtctctatgcttgagggatttttagcacagtaccatcttaggttagagtgatttctagagtatcagttccctcagaaaatttagatcaattattaaggggcatttagaaaaaaatcacaacttacagtgcccattgctttgttgtttacatagaaacagctaatacataaaaattgtcaatcataacagctacatgtttcagaagaatttggggtgagaatgatgaacactattaatgaaatgatataacagcagttgggaaatgccgtcaacaatataaaatgtgaaaactggatcacaaaagatgctagttatgtttgccagttaggaggcatcagagcgatttgaaccactttagctgtgttaatctttacttttccgtagtttgcctatatcacagagtcagtattaatgtataatggacatttattaggcttaaaattccaagaagttttaaatatgcatgtattagttatctattgccattgtaacaaattagcacaaaccttgtggcttaagacaatagaaatgttttttgggtttttttgtttgttttgtttttacagttctggaaaccagaacaattacaattaagtataaattcaaaatgagttatataggaataaaatcaaggtgtcatcaggattggatccttctggtcttggggagaatctgttccttgcctcttccatcttctggcagctgcctgccggtgttctcggctggtagctgtatgactccaatctctgtttctgtggtcacattgctttcttctcttctgcagccacatctgctcctgcctccctcctatacctgcaattatatttaggggtcacacaaataatccaggataatattcccatcccaaaattcttgacttaatcatttctacaaagccccttttgccgtataaggtagcattcacaggtcctgtgaattattactagattttattcatcctaccctaatacccattatgatatacccagattttaatacaaaatattattttaaccaggatcttttaaatgtgtttcatttagaaggaagatgattttacattttaatattaatgtggaagttcatagttggcctttaattgactatttgctctgttgattgtgtcattggtggttttctaaaagtaattctttaattttatgacatctataaaacaccagtatatccaaaaaagagaaatgtttgtagcatctctttttatatatttgtaattttccctacctatcaaaattggattagaagttagccaggaataagttaggagggtcctatagaattatccatatggtctaatttggtgggaatgggcatgttggatttggcaggtaattgaagtagaatacatttacagtaaacatttggaaatttgggttttatcatggttttcccacctttttaacatttaacaaacttttatttgaagataattatatgtttatagaatagttgcaaaaatcaaaacagtacaaaaaaaacccctgcatactctttatctggattcacctaaggttaacattttaccccatttgctttatcttttgttctctctctttgtctatgtacgtgtgtatatcctttgtctttaatgacagacatttttgaagaatgtagtcctccttcctgttttcccctctgtgaggatttttaaaaattggatgtaattcacatgccatgtaattcacttttttaaagtatacaattcagtggtttttggcatattcataaggttgtacaaggatcaccgtgatctaattccagaacattttcatcacctcaaacagaaacgctgggcctgacatggtggctcatgcctgtaatcccagcactttgggaggctgagatgggaggatcacttgagcccagggatttgaggctgcactgagccaagattatgccactgcacgccatccttggtgacaaagtgagaccctatctgtaaacaaaacagaatactttagcagttattcctcatcccacccctcctctaacaatcaccaatctaccttctcttcggatttgcctattctgggcttgtatgtaaaagtaatcatttgatatgtgaccttttgagtctggcatctttcacttagcataatgttttcaaggttcatcacgttgtcacatgcatcatttttgaatcatatgaagtgcagagtaacatccaattgtatggattaatgaaatggccaagtaatagtccatttatggatatactaagttttgtttatctattcaccatttgatgaacatttaggttgcttctactttttggccattatgcatagtgctgctatgaacattcaagtttttatgtaatgtacaagtttttatgtaaatatgttttccattctgttgggtgtacatgaaggagtagaattgctgggtcaagttaaactctgtttaactttttaaggaactgcctgctcattatttttagtttctttcctaaggtattttttctcctctttgaaaattcagggcagtgattctggggtgggtgtggtgggtgcgtttttcagcttcagatgtccttccagagatttaatgttgaggatagcttctttaaagtctagcagggtgctcctctcttgacctgagaataaaatactaagatgatctgacctagcagaatagttcttttcatttgtgtttagtggttttcaatgcattttgttttctatttcgttctattaaagaaattattggcaaccttagttgttttagtagattgaaatgcttcctaactgggatgttatttatccttatctgttggcttacaaggagaactgtgaatccattcaacaaataaaaggtttttttcatcttttaaaaaatcatggagaaaatgacacaatgtagcattagtcatattcctttaaatagaagaaaatataaaaataaattttattagtataattattttaaagatgtgatggcaaatccatacaaaagcttaggagtaaaatttgtttagctatattttaatatctataataattgcttattcctacatgatatggaagaaataaaaatttgggatttgtatgtagttcaagcatctttagtcataggtgagaagatctttaaatatcttaagaagcaaaagaaagaaaattcagtcaaagataagagttggggtaagggttgtagcattctgtaacatcaaaaaattaagtaacatttgacttagattaagtaatctaaggctgtaggctacaggactgtgagaagatgtgatggcaaatccatacaaaagcttaggagtaaactttgtttagctttattttaatatctataataattgtttattcctacatgatatggaaaaaataaaaattttgggtttgtatgtagttcaagcatctttagtcataggtgagaagatctttaaataccttaagaagcaaaaaaaatagaaaattcagtcaaagataagagttggggtaagggttgcagcattctgtaagatcaaaatattaagtaacatttgacttagattaagtaatctaaggctgtaggctataggactgcgaggcaaactctgcctttaagttaaaaagtacttattctgcataataaattaattagagttatggagaagaagccaggaatatctctgataataatgaaactttgatcagttaaaatgatattatccaaaaaatgccttgagatgataagactttcagtaagggatatgcaacttttaaccctagggagatttagaattaaatatgaattgagaatcaaacctagtttttctatttcattttggagcttggatatctattatcagtaggcagccaatattttatggaatgcctgtactataagatccctatggacaaaaataatatcctatttacctttagagttaagagcactaactttggtgtcagatacatattttcttccggctctccctatttcctcactgtattcttaagtttctaagcctcagtttcttcataaaatagaaatgacagtatctattttatattggtggggacaatgaaatgagatgatgaatgtaaagcatttagcatagtacttggtatatagtaggagcccaataaatgttagcttttttactgttactgttcttgttgttattgttattatgctattttcatgtaggttatgtaactattttagtaaatgtttattgaattaatgtgttacttttcagttacattgtttaatatttttaccttatttacagttataaatttgtttgaagtttatagaaaatgtatagcatgttaatatgtttgatagtgtcgtaccttctagtaaactttgataatttagatctgctacatagaagagagatttaaatgttgtctctctttttttttttttttttaattttagagacctattactacatttctccattagttggtgtatttttcttggctctaacccctatttggattataatagctgccaaacatccagccacaagaacagttctccactcaggctgggagcctgtcataacagctatggttataagtaggttagtattaaaatatgtgtgtgtgtgtgtgtgtgtgtgtgtgtgtgtgtacgtctgtctgtctttgtgtgtcttctataagcatatatgtacatgcatattaaaataaatgaattgcctgtttttatttcttaggttaattattttatatagccaattcattattctcccgggtattataacaagggatctaaatgacaggcataattaatgaaatcagtagatgtaaagaacctcatgtggctaccaatttcaaacttctctccaaagccttaccagattgagtaaaatttagtggtgtttgtctttgtgtgtgtatgtgtatgttaacctgacaaggacattacttactctgagtattaagttgctcagatgagtatcataaagccttagaaatgtatattccattggctacttccatatctaggactctgatgaccttaaagatgtaattaaggacatatgtaaaagatttagctgcaagcatcctcatcaccccagagtttttaataacaaaaataaatagaacaacataaaggtcttgcaatacggtattgatcagataaattattatatagtcacaaaatggagtatcagccattaaaataacattgtagcatttctattgctatggaaagagtttatgatacatctgatgagaagaacaacctagaaaagagtatgaatttcctattaaacatgttagattaagaaacgtttcttttccttcctgaaattactaaaaggacagtaaaagaataaaaatgctataaaaccacaaagacagaggaggagcaaagagggcagcaggtgagagacaacattaggaagataggaatcagatgaagagttgttaactgaatgagcagaatgaaaaaagctgacacctaactgcctatcagaagcaagtctcagaaacccagaaagaggaattaaaggcatcaagtacatctgaaagctgcaatgaggaagattggttgaaagtttaggtaaggagcaattagatccccacaatctttctccagctttagcacccatgtgactgccccctcacaccctagcagaagacaagaataacctctcaagaggctaaatcggagaggttctagattcagaaacatctgtacatgtgaggatgtggctcaagcactgtgtgacaaatagcaagactaagtaaaagtctactgaacaatgagaaccctatcccacttccttttctttgtataatgctgagagacagccttttacccccaggcaaaaaattagataattcatttgtgggggaacttaccagcacaaaagatcagatctgcagatactaacccttgtgagtcctttaatgaaagagctacaaacccacctgattgtcttccatgagtcccacttgctgacaaactctgcccatgtacacagagagttccaagtatgccttgcagtgccccttaaacagggcagccagtaaaggattgctagacatttcataaaggcctctaacataaaagacagatgggaaaaaaaaatagtactcaaggaaagtaccatcagtactttcagaaaactcttatcagtatcctcagataaataagagaaactattgcataatagctattgcataatattcataatataggaacagaatgcaaaagaagatttgaaaaacacaaagagctcttgggaattaaaaaaatacataaatggcagaaataaattatgtagaagagttggaatataaagtagaggaaccctcctgaaaagcaaaccatgaagcaaagagatagacaataggaggtgaatgataaggagagaaaattctcaaataaataatacaagaaaattcccagaactgaaaaacatgagctacctgatggaaagcgcctgctaagtacccagtgcaataaattaaagtaggtgggacccaagtgaaagcatattatcatgaatcccaaatgtttccagagaaaaaataagttacatataaagcactgggaaccagaatgatgtccagtagcaacactaaaatgattcctttgaaattctgagagaaaattattttgaacataaaatacagtcacaatatcaaccacgtgtaagagaagactaaagaaattttcagacaggcaggatctcatggaatttactgcccctctacccctttgtataaagctgaaaggaggtgtggtctatcaaaattaggaaacaaattaagaaagatgatacaggaaagaagaaatctattctgtgacagcatgtggttcatttttctgtaatgtagattgcttttttcctggaggattcaggcaacagaatcccatgaaatactgggcttttgttatagtacatagaccaggatccaagggggtattggagggaaggtacaggatgacagctgtacatcaggcctagacaggcaaccatccagattggcaggaggacaggggacttaaggagggaggtctctaagaaaaaaaaaaaaaaagtggaattgatgagtttgactgtattgaaaggtacttcataaacttagttacacatgtgaggttgaattagtaataggtacctaaaaagttaagaaaaatatgaggcaaagcaaaaagcgtacgtgaggatatctaataatacactctgtggctcagctatgagtaatgaaatttctgttgttataataaagtcaaccctaagtatttcaccagaaattataaccagattagcaggatgggaggaggaagggatttgggaagggatcaaagtgggagggaagtgtaagagaggtcaaatcctcatctgccatagtaggaagtcatttgctaaatgtctaaaatttaatatgaagaaatagcagtataagcatgttatttagaaaaactaaatgccataagaaactactaaagaagataaaaagaatttctagtacagagaaggacctggaggtggggctagggaccattattttattatgaactttatggtacttttatatacctcttttttttctttttagagattgtgtctcgccgtgtttccccagctgaagcacagtggcttgattgtagttcactgcagcctcaaactcctaggctcaaacaaccctcctgcctcagtttcttgaacagccgggactacaggcatgcacccacccagataatatttttactcttttgtagagacagggtctcactatgttgacctggctggtcttaaactgctagtctcaagcagtcctctcacttcggcctcccggagtgctgggattataggcatgagccaccatgctggctgtacttttacttttttaatgacacacatctatatgataaaaataaaatttaataaaagcaaataaaactacttttatcatttaatttttatttttaaaaatgtatatagtaaaaaagctgggttgcggagatgttggtcagtggattaaaaattttggttagactacaggaacatattcaagagatttattgtacaacatggtggtgatagtttataacagtgtattgtattcatcaaaattgccaagagattttaggtgttctcaccacaaaagataagtatgtgaagtaatgcataagttaattagctcaatttagtcattctacaatatatacatatttcaaaacatgttgtataggtgttctcaccacaaaagataagtatgtgaagtaatgcataagttaattagctcaatttagtcattctacaatatatacatatttcaaaacatgttgtataggataaatatgtgcaatttttattgtcaatttaaataagtaacaaaataagttaaaaaaagtctagaagcctatataacagcatactaacagtgtaactcaatggtgtaactagggttggtttttactttcttcattttgtcttttctaattttttctatagtaacttttatcactgggcttaacaggaatctaaaaaatgtatttttagcaattgttatgttatatccacaacatgatctatatattttgtcagggaggtttattttttgactcagaactagtttgttcttgaagtatgtactttattcttttaattagggcttaaaatgttaaaatatttctaaagaggactattttgggactctacagtgtacctctttaatgagaacgcccacagtttaggcctattaaggcataattcctttattttactaaagaattaaaataataaagatttgataattttctaatgttaactatcaggtaagaacatttgatctgatattttgacaatcccattctgtgacagcatgtagttcattttgttgtaatgtggatggcattttcctggaagatttgggcacaggatcccatggaatattaggactggcaatgttttatactacacagacccagaaactgatgttaaccagttgataatggccttggaaacttagaaaaatctccaagttccactgacacattgagagtgtatggcttgctaccatataacgatatgttagttttccagatttctgttctcaagatcagctctttctgtggctataactcattattttaatttgccagtaataagacacatcctaacaatatctagttttaatacaataaaaataacctcttttatgctttatttcaaatatgaaaccatactcttttttaaattattttttaaattataagagtgatcaatggcatggttttaaaaaattaataagcacagaaggatataaaatgaccgtcagtcccctgtcaccctcacccccagaaatagacatggttaataatttctcgtatactgttcaagacattttaatgcatttaaagcgtatgctttttcttttcacaagtagcatatcttagacatcagaattctgaaatttggggctagagcttatgccgtgttttattttcaacattttactgttgacattgatttttactttgaatatttttatttttgctctatttttaaaatgtgtgaatattttattttaaaaaggaggggtgtctgtatgtacagaataacttcaagtatgttctcttccctcttctctaaattatataattttatctctttcagcattgggggccttattctggacacaactgtatcagacccaaacttggttgggattgttgtttacacgccagttattaatggtaagaattagatatactgtttcatgataatatcaaatcttcgtatcctcttagtcttaggtactattagaagtcttagggctcagattcaagaggtctgtcctcccatcccaaccattctgcctccaaccccaagttgttgctcacagtgaaaattacattcccaggtctcaacaggcagaatacatttctgaaaagtaatctttcttaatcttatcatgaactactagtttgagagtcaggtatacctgacttaagattaatgtggcaaaatatatttcagattttgtttattatttacattgggattatcagctattgtatattgttttgttgtttcttttgtcaatttttgtggataaattagagacagctgggtttcaacattgcttatccattcagttcattaaaatctggggtgggcacagtggctcatgactgcaatcccagtgctttgggaggcctaggtaggagggtcgcttgaggttaggggtttgaggccagggcaacatagtgagacccccatctctataaaaaattcaaaaattagccagatgtggtggcacacacctgtagtcccaggtatgtcctcaggaggctgaggcaggaggattgcctgagcccaggagttagaggctacaataagccactgcatgctagcctgggaaacagagtgagaccctgtcttaaaaaaaaataaaagaaaaaaatctattggtcctcagctgatccctttaaaaatctgtcgtatatttttttgttatctatgaaatgggaattataatacttaaattcacagacatttatatatgaattacatttaataagatcattttaatccagtctaccggcttctggggtgactgtcattaaagtggatttttttttttttttttagtttaagttctgggatacatgtgcagaacgtgcaggtttgttacataggtatacatttgccatggtggtttgctgcacctatcaacccatcatctagtttttaagccccgcatgcatgagttatttgtcctaatgctctccctccccttgccccccacctgacaggccctggtgtgtgatgttctccctgtgtccatgtgttctcattgttgaacactaaagtagattttaagtacagcctagaccaatataatttaaaaagtaattctacttggggaaaaacatgtcccaggatatactacatatttaatgtaatttactttgcatatctatgtaaaaagaaaatatgtcagttgggcacggtggctcatccctgtaatcccagtactttgcgaggccaaggcaagtggatcgttcaagctcatgagtttgagaccagcctgggcaatatgaccaaaccctgcctgcacaaaaaatataaaaattatatttttacaggcatggtggtacacgcctgtagtcccagctacttgggaggctgaagcaagaggaccttctgagcctgggagggaggcagaggttgcagtgagccaagatcacgctactgcactccagcctgggcaacagagcaagaccttgtctcaaaaaaaatgtatatatgtatatatgtaaaaaatatatatgacatataaaggcaagttcttcaaaatctaatttcatgtctaaaatttctactgaatattttaatttttatatcactttagaatatcaatgaacaaattttccctataggtctctctcttcatgccaccattctccccgtcacccacacataaaattgtgggaccatctatttcaacctggtccttcatcctctttgactgaaaaatgaccaagccattgtctgcttgccctttaacacagttcacttgctcaatcatttatttatataacaagcatgtcttactcttgtagcctaatgtctcaatatagccatcattcaagtaataaagtaggcttcctgactcactctctatttgaggcaaattaagtgtcactaatagcctagtcattcttaaacattgtttttattacatgggtcctaagatgatgaatttaacagtggtttttttccctgcctatcagatcaaatttgaattcttctgcctagctttcaaggccctctgtacatggttggactcattgtttcccaaagacatgcgcaattttttcattatcattctaactaggtttttatattgtccctacaaagattcatctaattttcactgcctggaataactactgctttcctccctcctcttcagatcctcttctgtgaatattaatggatgagttcattagcataaacattactcataatgactgttagagctatattaaacaacatttcagtaagaaatttaacttaaattacaataacccttttattataaggctttaatgcatatttcagttgttttaccttaagtaagaaacaattctagagcttcactgaaatgctctccttggatgtctgtgctgtggcattgtgtgatattcatagtaatatatttttagtatctcagtaagtaaacctcttagttggctatcagcactttgggaggccaaggcaggtggatcgcttgagctcataagtttgagaccagcctgggcaacacgaccaaaccctgtctgcacaaaaattataaaaattagccgggcatggtggtacactatgagcttataaattccactctttaaaaaacattaatagagatggtttactctatgctcctcaaataagatggaacttttgagaattgaatttcatttaaaatgtgttggggaatgtactatttaaaggactcttgtttatcttcatcattatcatcattatctgctatttagtgagtacctaccactatgtaccaggtaacttacaggttttttttatacatgttgtgtcgtataatcctcacaataagatcagtagattgtctaaggtctcttatcttgtaagtggtgagtcacgattgaaaaccagatcgggtctattctaaagcctgtgattttttttttctcaaaatatgcagctactaatttatgttttattagctacaagaatgcatacattgtttaaggcatatctgtgttcatattgtgactaggatattttttaatatttattaatgtctttcagaactagtggcattttccaaaatatatttcatggtaacactagttctgtgagatgttaataagtataacttgaaaagtgagttctgtggtcaatcaaatttgttaaacattaagttaaacaaacttgcttactacgagatttctttattgttgttggtgttaattcttctttatttttttattttctttttattatactttaagttctagggtacatgtgcacaacgtgcaggtttgttacatatgtatacatgcgccatattggtgtgctgcacccattaactcgtcatttacattaggtatattttctaatgctatccctcccccctccccccaccccacaacaggcctcggtgtgtgatgttccccttcctgtgtccaagtgttctcattgttcaattcctatgagtgagaacatgcggtgtttggttttctgtccttgcgatagtttgctgagaatgatggtttccagcttcatccatgtccctacaaaggacatgaactcatccttttttatggctgcatagtattccatggtgtatatgtgccacattttcttaattcagtctatcattgatggacaaatttgggttggttccaagtctttgctattgtgaatagtgcctcaataaacatacatgtgcatgtgtctttatagcagcatgatttataatcctttgggtgtatacccagtaatgggatggctgggtcaaatggtatttctagttctagatccttgaggaattgccacactgtcttccacaatggttgaactagtttacagtcccaccagcagtgtaaacatgttcctatttctccacatcctactacgggatttcttaaagcctttatcatgctaacataaacgtgagtctctctttctggtacttctgttagctaggtgttgggatttctagatctaaccttcctcagaccccctagaccacactttgagaaccattgatttagagcttatatcttttttatcacagtctactttcaaacaatagtaaaccactttacatataggataagaagcttatgtcactatacttgaaataccactcctctttcttatgtactcttttttgaaatacgttttacttatgtactcttttttgaaatacgttttacttttttgaaatagtaaatcctgtaatatattgttattattttttgcttcagttatttttaaaaagagactaaaaatgaaaaatatatcttttagattttatcatataaagttatatttccagcactctttcctttgtgtagatccaggtttttatctggtattattttccttctgcctggagaaattcctttaatgtttgttgtagggcaggcttacagagaaaatagagtctttaggcatgtctctcccagcgtgctctttcctttcccttcacctctgttcgtatctctaacaatgtctatttttaacttctttcacccctatctcagaagagctgattcttttgcccaggactgactagttgacctgtgccctggatactattccattacaattccaatgggagccttactccatcaattattttaacttttccggtatctcccatgtcttcctctcttacatcttttccctttagcttacaaatgtgcacaagttttttatcccaagtcacctttcccatagtgctctgccttctcaagcttctgttctgtctcttctactctctacaatcaaactttcccaagtgtagtctgtattttttcaactcattatagtatttttcttccttctcactctacaaaactgcttttactaagctctccagtgacctcctaattactttatccaataacttattttcagtcttcattctattcagttgtttaatactatttactataccctttttgcaattctaccattctcatcgcttctctgaaaattctttttcattttccttcactggttccttctttctacctgtctctttgtattcttcaagaccctgctcttgagcttctattcttagttttcaccttctttatgggcaatattgtctcatccagagattttcaaagtgtggtccccagaccagcaatatcacttgggatcttattagaaatgcagatgcttaagcctgaatcagcagctcggaggtagaactcatcaattgattttgatatatgcaaaagtttgagaacaacttgtccttgtcatacggctcatttcatggctttatccctagtcttgacacatctgttcctttctagatccatactttaaattggatatttccacatggaacatctgaagcttctaactgaactcatcctcttccccgcaaacctgccctttggtgtttcctgtgtcagttagcggtgttagctacccagtgtcccaaacaagatatccccaatcgcatacttcctctcccttatcgtctctatttttatctgctcttgaaatagcttctgaattcaagatgcattggttagaaggaggatgaaagctatgttattgtagccaagaaggattcaagacggactgtttattcagtgatcaggaagtcatttgagagttcagttttgttgagtagcagactagataaatgaaagtacagtcttacaatagaatgttattaacaataaaaatggattaattacatgtcccagaagagcaaggatgaatctcagaaacttatgtgataaattattccatttatataacgttcaagggtacgtaaaaccaaattatatagtatttaggaatatacatgtatgtagtaataacacagagaaaagcacgagaataaaaaacacaaacatagtcactctgatagcgaaggaaggatatgggattaaggaagagcacagagggcactacaaatctaaagataatgaattccttttcttaaactgagtggtgggtacatgggtgtttttttgtagtgtaagtctttgtaacttacatgtattttataaatattatttttgcatttattaaatagtataaaacaataaacatcttagaagtagcacttttagacttcatattaattaattgacaatgaaaagaaaagaattagaatgacacttagaagtccagatgaggaactttttccaagagaagagacatgtgggtacgtttgttggcaaggaggcaaaggagtaatagagaaggaaagatcaaggatgcatgagagatggtgaatagtgagggagcaaggcccatgaaacggtgggccacacagtagccttggaaagaaaggataaccccttatctcactgtggtaagaaaaggagtcttgaagaaagacaggtgaaaatacacagatacgggctaggggatagagactaagatgaagggtcttacaactgacagcctcagttgtcccaggaaagtagagagattcatttctctagggcagtgttttctaatctttctcatgtcatggcacacataaaaattaataatatttggatggcaccctagggtgaagaaaacagccatttgtaaccagaggtacctgatttggaactgcagccatgccaagagcttggaggatagtatcttgacacagctgtaacccatgtgaggcacactggttgggaatttctgatctaaggcggtgtttttttttttttgtttttttgagacggagtctggctctttcgcccaggctggactgcagtggcgcgatctcggctcactgcaagctccgcctcccaggttcacgccattctcctgcctcagcctcccgagtagctggggctacagtcgcccgccgccacgcccggctaattttttgtatttttagtagagacggggtttcaccgtgttagccaggatggtcttgatctcctgacctcgtgatccgcccacctcggcctcccaaagtgctgggattacaggcgtgagccaccacgcccagccggcggtgtttttcaatcttttattttcatcatcaccttttgaaggagccgtttgaatcaatttttttttctaaatatacctacccatgaaattttcattttgcacatctactgtttatccatttatgtgctgtatgtgtaaatgggctttataaataaaatgagtgatattttttctcctctcaagaaccagttttcacctctgttaagaatgtataatctaggctgagcacgctggctcacttctataaccccagcactttgggaggccaaggaggtgggattgtgtgagctcaggagtttgagaccagccaaggcaacatagtgagacctcagttctactaaaaaaaaaaaaaaaaaaaaaaaaaaaatcagccaggcatggtgacatgcacccgtaagtcctatctacttgggaggctgaggtgggaggatcacttgagtccaggagatcaaggatgcggtgagccgtgattgcaccactgcattccaacctaggcaacagagcaggaccctgtctctaaatacatacatacatacatacatacatacatacatacatacatacatacatttatttaaaaaataatgcatgatctatggtaaaggaagtagaaaatttagagagttcgtcagccatttaccaccttgtctacaagtgggagggaaatggtaaaggtaatggattagggactagggaggtaaatatgcctacccttgtttaaataaaaagctcttcactaaaagggtgttccaatgcatttcttcttaaaaatatgaaaaaaatggaaaatatttctcctccatctttttgcatttcttgaaactcaaagagtaatttctgcatgtgagttctggtaagtcttgagaggaggataggtgaaaatgcagaggtacatagagatggagaaaacaggtagggatataggaaggggccagacttattatgctgttgattataaagatttatttcttaagaaaatgaacttttgctttgggtttccttcggaatgtgcaaaggaattcttgacagaatttgaaatatattccatgacgttagtgctaaacatttactggaaacatatatttctaaatttaacaaaacataaatttggatttttaaaacagtccctagattaacctgctgataatttcttcccactctcaaactttatttcatcaactgagcttattcaagcattaggcacttaaaattctgtcttgtggatactgaggaatctcacatattatttagtatattgacaagttgtttttactaatgtttttaatttgtgtgagactatctttagatgctctccactggctttaatagtgcaattagtccctgaagaatttaaataatttaaaagaaatgttgacagactagcttttagtagaaacatagtgtatgtcattatagcaagaaagcattttttgacattaaagaaaactattctaaggtaataattttgttatagtttaaaaatataaccaatgatcatgatgaaaccatgagaggttaaaactttaattagccccttcaataattatgttgtttacttaaaaattttattcaccttatctggaaaaatgatatcagtgtctttctgaagtccctcactcattttctttttagtttggtacaattataacatcagttatgtctgtgtttcctggactacagtgtgataaggtgataaactgtttatttataagactgtttatatttattatcattatcttagtctgttatatggtaacaaagaaatgataaaagtagttttataaagttttaccaacaaatttgtgggttttagaagagagctacaattaatcatcagtagctttttgtttcaaactcaagagaagttgcagttgtagagtagatatacgttggcttaatagcagatgctttctgtgtttgcattgaagcattccatatccaataaaataccacatagaacattacccccaagagaatccccagagtaactgaagaggaatgcaatttatgcattcctatggaaaatatccatcattgaaaaacgtatctgaatgtaatcttctgctttgcattaagtataatttttgatattagattcttttccttttgagtgactataaagagaaagattacaaagctgtttttgctagtttaccccttattggcttacccagtaactttttgtgaaaatgcttgcattatgtagttaaatactcttgccgctttcaatttctgagacattttcatttaccttcacttagaggtataagctactggccttgtttatatgctattatcagatgagtaccgatacatgctaattattcaatgttctaattgtttgtttatttttttattttttaatgtcagtgagtttagcagtggatagtcgtataccaactttagcaacactaatgtgaataagttctgataaaccactaccattggaccagcctctattcttttctttagaaagtgagttcagatttagagaatccagactttaaaaaagatagtcacctctaacttctagtagaaaattcattgagtaaacagaaggcagtttaattgattgtttaaaatatgggtgctagccaagcttggtggctcatgcctgaatcccagtgttttgggaggcctaggcaggaggattgcttgagcccaggagttcaagaccagcctgggcaacacagtgagaccccatctctaaaaaaaattttttttaaaattagctaggcatggtgatgcatacctgtagtcccagctacgcaagcggctaaggcaggaggatcacttgagctcaggagttcgacgttgcagtgagccacaatgacgcaactgcactccagcctgtgagacagaacaagaccctgtctctaaaaataaaaataaatgaataaataaataaatagaatgggcaccaaatgatttattctctttcatatatatattttaaaacaaaatagtctgtgaattgaaaatctatacagtttctggacatcctctgaccaatgaattctccagaaaatgtcaggatctataattaagaaaatgccaagtcagaatcacattatttacataaatttattattgataataacaataatatttaacattttttaagcctttaccatgtccagaaactgtgctaagcatctttcatgtatgcattattttatttaattctctcagcatccttatgagataggtattatccttattttcagattagaaaatggaagctctaagaagttaaatatcagtgatgtcatagcaagtgactgaggtggttttcagaaaaacccacatagtttgagccacagtcagaatgttacagagaacacagctctgcatttatgtgccttaattattctatctagtccatgtgacttttaaacacatttttaaagaaatttattttcctttagaatttttttcagaactccctgggatacatattttaaacatttttatgatgaactgcattttaaattatcttaagcatttgctttaatgaattttgtatttactaaatgagatgtgatgaggaaatcatgaagctacatttagtttaagatcaagacattataatttcagccttaaaacaataatgtttaaattgcttcatttttggtgcattggcacaaaaagtgatcaacctctcagcttagaaggggggaagctcatgcttttcctgtttctgtacttacattttttctgcaattaaaaaatgctaaattcttattccacataacaaattaacattattagaatgcagcgaatgccaaaacttcactaggtatccggcaatatataggtgatatataggtaatattgacctaaatatctttgaacagaattactcaatctttatttctgagtataatatttatgtatgcccaagattaaactgcgtagatttggaggctgctagggctgggttttttcttaataagaaactggatcctaaacatcacatcctaaattattaagcaaagaattaataatctagcacaagccagataatcctattataaaaacaaaacaaaaacaatgtagtttcatcacttttttttggagggaaatctattttgcttccaggtaacttggatcaacagtagacctggccagaggattgctgccttctgattctctgtgatatcatcaaagctttcaacttttagcacctggttcagacatcctgttgcaattgttctctaattcttcttcaaaaatctcctgcaccagtgtattcggtatgatttaaatggagtccttcataaatttaagatgtcaagttctcttgatttcatacttctttcagagctcattcttcgaactgttgtacatatgtaggcatttatttgagtatttgtctaagagtggaattgctagattgtagagtatgcatatcaacaactttatttatttatttacttacttacttactaaagatagggtcttattctgtcacccagactggagtgcagtggcatgaccacggctcactgcagcctcaatctcttgggctcaagccatcctcctgcctcagtcttctgagtagctgcaactacaggtgtgcaccagcacacccagctaatttttttatttttagtagagacaaagtctcactatattgcccaggctggtttcaaacgcctaggctcaagcgattctcctgcctcagtttcccaaagggctgagattacaggtgtgagccactgcacttggcctcaacaactttattacacaatgccaaaatgttttcaaaagggattataacagttgacactcttgctagctttgtgtaagagttctcattgctgcacgtcgttataaatagttgatgtttttaggctaaaaggtttgccaatctgatgagtatgaaatgatatttattgtgcttttattcacatttctgcaattactgattctctctacatgtaggatttctttatatattctggatagtagtcctttgacaattatacgtgttgaaaaaaattcttccactctgtggcttgtctttccactttctccatgatgtcttttgatgaacagaaggttttaattacactgtagtcagatttgtcaacattttcctttatggtgtgtaatttatctattttgttaaaaaatccttttcatccattcgttatcatcttgcaaaacttaatatgtttttcttttgcacgaggtctttaatcatgtggaatttatttttgtgcatgatatgagtggggatcaaattgcataggtttttggcatattaataattatcttagcactacttattaaaagtcgatagcactatttattgatttgcagttcctcctttgtcatatgtcagatttggtgtgtgtgtgtgtgtgtgtgtgtgtggttatcaagttaaagaagtcctacttgattcctggtttgctaagagtttttaatgataaatataaaattttataaattattctgcatttattcatccaattatattattttttcctccattcatttgttaatgtgctgagttgttttactttctttccaactattaaatcagtcttgcattcctaggataaatcaaatttggttatgatatacattaaatgttttgctggatttgatttgctaattgtttagtatttttaaaatttatgatattcctatattatccttttaatgcatgcactgtagtgatgacttctctttcattcttgatattagaatttgtgtcttctacctcttttttatctattcaaagaagcagctttttgtttcatttatttttctctgctgtttttattttctatttcattgatttctgttcttattttattccctctttatgctttcttttggtttaattttttttcttggttcttaagatgtgagccttagatcattgatatgaaagctttcttctttcctaatataagtaatgctatgaattgctaagtactgctttatgtgcctcccacatatctcaatattttatgttttcatttgtagtaaattcaaaatactttccaaatttccttgtgttttcttctttgaactatgggttatttagaaatgtattgtttactttccagatatttgggggaatcctcagatatcttacttttctgttatggaaagagagcatactttgcatgttccaatcatttctaatttattgagacttgtcttatggcctgtaatatggtctatcttcattaatgttccatgagtgcatgtgtgaaatgtattctgctgttgttggctagtatgttctaaaaatgtaatttagattaaactggctgatagtattattaaagccttctatatcactgttgatttttaaaatatagtaagtcctcccttaacatcattaataggttcttaaaactgtgactttaggtgaaacaatacataacaaaaccaacttttttctcatcaatgttataatacaacgacattgaatgatgctattctaggacctgctgtatgtcatttcgcttacagtctgtttccaagaatctatcaatgacattaagtgaggacttactatatgtgtactcaatgaatgagatacagtgttttctgtgtataaaaacagacttgtctatttttcctcttggatttatcagtttttgcttcttgatgtattttgaggacttgactttttttttttttttttttgagacagagtctcactctgtcgtcaggctggagtgcagtggtgtgatctcagctcactgcaacctccaactccagggttcaagtgattcgcctgcctcagcctccggggtagctgggattacaggcacgcgccaccacaccaagctagtttttgtattttttttagtagagacggggtttcagcatgttggccagcatggtcttgatttcctaacctcgtgatccacccacctcggccccccaaagtgctgggattacaggcgggagccactgctcctggccgtcttgaccttcttaaactttattcgatgttcgtctttatccttggtaatattccctgttagaatgccatttttttcccccttgatattgatatagtcactcttacgttcttttccttagtgtttgcatgatatatcttttcccatatttttacttttaatttatgtctctgtcttttaatatatttgtatatcttttccactagatcctttaacttattaattataattattttaaattccttgttggatggtttcaacacccgattcatctctgggtctggctctgatgacttcttaactccttcaatggtttatattctttattgctttttcctgtcttttaattttttaattgaatgatggacattatacatacaagaccattggagactgagataaatattatttatgcctagaaatgggagttcttttcttctgctagatcattaggatggaggattgagtcaatctagtcagcagttgaactgggtttgttttttatggttattatcattaccctcagctcaccactaacctcaactttctttatgggcatgctccggctaccctgtgctaagtgtgaagcgtggagggctgtatgcctgcagcctggaaggcttaactatctgtgctcttgctcttcccccaacagtcagttgctgatgtttcttagtgaaaggcatgggatggagtttgagattctcttgctctgtccccaatcttaggcagtcctacactcatcagttaagaatttgaatttttcagttttcttcttactcacttttatggcttaacttctttctcctgcactctgcaaaaggagaaacaatttaagtatcatatcttaccttggaggggcttaccactctttggaattcatttcacatcctggcatcaactcttctgcctcagagtatgtgagagggtaatgagtattttttccagtggctctgtaccaatttctttagtaagctgagaagaaaagtttctagctttatctatttgagtaagtccagcttatcttccctgtcattaaggtgataaacatgaaggatcttggtacctaattttatttcttggttttgataatgacttttaaaaattacctgctctggtctgcttgcataccagtcaagtttgaaaaaataatgaattaatcttatctaacaatgattttatgcctttggaatgtctacttcaacattaaatagatcaacatttcagaagaactctttattttgttttattggcccagaatgttacacgaagaggcttgcttttggttgaatttatgcaaattgtttaaaatatgaggattgctactttgtttttccttgtgtttcaggtattggtggtaatttggtggccattcaggctagcaggatttctacctacctccatttacatagcattccaggagaattgcctgatgaacccaaaggttgttactacccatttagaactttctttggtccaggtatgtgcttatggatttttgcatattttagatcaagggctattgctctctaagattataggcaggcaacatttattgaatatgtgttttgtgaaagttgctcaactttccgatttctgagagctaatcccagtgaatgaaaaggcatgtgtatcaagtctgcagttgctgaggatctttgtataatgtttctctttgatgcctctttctggggtatcttgcttattagttgtgaaagagaaaccttattttgtgaaagacaaaaaaaataattgccaggtgatttcgggaggcagatgtactatcttatctatattattattttggcctttctaaatgtaggcatttgatctcaaacaaaccagttgagaagggataaactcgatttcaaggaacagtgcattatttatgtggctatgaaaaaacaaaggcacatgattaccaaaaaactaagaccacaattttaaacttcacaattcttgtcattttttttccctgatgaaaataagtatgattattgacttttgttttagaaaattttttgttgttgttgagacagggctttgctctgttgcacaggctggagaatagtggtaccatcacagctcactgcacctcaaactcctgggctcaggtgatcctcccacatcagccttctgagtagctgggactacaggcacgagccactttgcttggctaatttttttttatctttattttttgtagagatgaggtctcactgtgttgcccaggctggtcttgaactcctggcctcaagcagtcctcccaccttggcctcctaaagctctgggattacaggtgtgagccactgtgcgtggccattattgacctttgaatgaagatcagaatggctacccttttaataccagtgatagaattctaaagaaattaataaaattaaaacattcttgtactgtaagaactttatattttctctgtttttatgatagatattaaagtgtgaccgatgttcttcatagcaagtttttatcaaccacctttcatttaattaacatatatagtggaaatttcagagaatgaaatgaattgtaactacttgaaatttatttttggcaatcaaatttcatgtgatagtatgaagtatagtaactagaaagtaatcctcaaattttaataactatgacctattattaaccaaaatataattttgttttaattacttttacattttatattacaggagtaaataataagtctgctcaagttctactgcttttagtgattcctggacatttaattttcctctacactattcatttgatgaaaagtggtcatacttctttaactataatcttcatagtagtgtatttatttggcgctgtgttacaggtaagagttaaaacttcttgaaatctcttttatgctgagactgctgtaaaagtacaactgtggaaatataaaaacacatgacacattttaccatttcaaaaatcaactgaacatcttcatattgatttgatcttcttaaaaccaataaacaattttgtgttagtcatcaatatttatattattaggttcatgtaaacattgtttattatagagtcagataatttcactatggctatatttacttttcttatattttctttcccatggagctaataatcatatctctttgcatttgcatcattttccataaacccatctttaatttttaccaatggttctagttttattttggcttcctgggcatggcttcttgctaaactttgtagatttggtaccttcttcagtgcgataagtcctaatcccttaagagatggattcaaatagttctttgaagagataacatttatcatttggctttcaaggagtttggcgtgtaggaaggaggctagaaggtaggtatgtagacattattacactcaaaagaaactacattgatgataatgatggtaatgaaattagttggcatgtatagtgtttcctatatgctcagaagcattataagtgctttatatgtattgattcatttaattctcacaaaatgctatgatatttgttcttttgatataaatcagcgattttcaaagtgggatacatacaaagcaatgcatcgtgtggaggaagaaaagattaaaacttcatttgtttaaaatatctgttttcttctatttttgtgtttgcttagtaataaatatattttagcacaatgttaaataagtataccaaatattttatactgagagagctgcataatctaaagctttttggagattactgagttaaaacatagaggtgagaaagcacagggcttgtgcaagataaaataattcatatataggatctaacagacaagataaggttaagaaggttgattagggctggtatagaaaaggccttaaatgcaagggaaattagaatctatccttaaaataacaaaacccttacaacttgacatttttaacttgtctattatgctttatagtgccttagattttactaaaagtcacctatcgaataattaattaatttattcatccagtaaaccttcatgctactagatggagggatggcttttaaatcccaggaggaataagttcagactctgtgctcaaggtctcgtagtctagagggaaggccactatacgaaaaaataattataatgtactataatgtaagtactgagtttagctatatatgaagtgctttcagagtttgaaaggaaaaggaagtacctctacctggggagtaatatttttctatagttcagtagggacaaaacttatagcaaattgctacttttattgctgtatattatatggtcatttattgtcatatatgtttgatgctgttctctgtgtaactattgtgaaaaagatgcattcttcaatcccaggggaaatattcagagactagtgtttggtttgctgataaacaagccattgctggagcatattcctatttgcaactctacctcttagcctcatggattatttgacatttatgtttatggttctgtgccattatactatcatgcagcatttcacttaagtcaatgaaggatataagtaatttttctagtttattaaaaatagatttcaacatatatccactgtgtacctacatgccttttaaacctctgatctaaagtctcaccagtgaaagctgaataactagaatggagaaaagagtaattattagtctctctgtgtctcagttaccccctctgtaaaatgggagaggttgtactatctaccagacaggctgctttgaggattaaatgaattatttatataaagtgtgtttatagcagatgctatataagtgttagctgacgctattgttgttgttattaaagatagtattataaatggtgtgtcattgatttcagaaggacagctggaaactatactgttgattgaattttcttatgtgtcttttataactttaatttttatgggctttgcttttcatttttcccccaagaatcagatatctgccagagtagacctttgcatttgcagcctgacattgtgcattattctaatggaatagcttaggataggttgtaaattcttagatcaaatcttcatgttctgacactagcatacacataagcacatgcacacacacacctctttaaggtttaggtaaaagatcttgaccttccccacctggcttcagtcaatccaaagatgaacagaatgaagaaataactccttaaagacaaagaatctttcaccacttaaaacttaccttttaatattctttactagattgtcttccttttttgatctaggttaaatttatattcaaaaccttggtccaagctcttattcaaatattttagttcatgccactcttctcatccctaaactctctaatttgattggatattctatagtgcagttttccaatgcatgctgaatttctccccatctacattcctaccttcttgagggttgagaccatgcctttccctttggtattccccacaggacatgatatagtggctggttttataaattattgttgttttacacacttcacagactaatactctttgaggagcttccctgctaattccccaacccactaaatgaaggaaatctatttgaaggaaccttcatattgcacttattataatgacatagtaacaatcatttgcagcacttttgcatttactcagatgtcatctcttcctggaagcctttcttgaatatctgatttcctctgaattgccttattctctatttcccaaagtaccctgtgaataccattatcttagcattttccatattatatcgacattatctataatatttattgtgtctgtctcatccattctagaaataggatctttgtttactcattttttgtatctccagcacccagccctgtccctagtgctcaattaatgcttgttaaaactgaatgactgtatcttgccagctccatctccttcagtggaaggaggagaaaattttataactgtatttaggtacaagaaatcacagaagaactaaaaaaaaaaaacctagattttttattctccttgtcttcaataaacaccagtttcctcactgacataggtatccaaaataaaaacaattaaaaatgaaacacagaaccccacaacttctaacagtgatcagttaaaattgtaaggttttactgaaatgtttagagatgaaataacttgatttctggggaagtggaagtggaggggtaaaactggtcatgagttgataatagatgaaactgagtgatggttcctgagagtgagtggggttaatttatactattctacttttgtatatgtttgaagttttccttaataaggagtttttaaaataaaactttcagattttagatgttagtataagatttttttttcagagtatatcatctctcaattttggtcttgtagctgaatgggtatttcttacttcaaatgaaaagtaaaaagccaacttaaatttgaaattctttggcattggaatggctgagttagtttcttattttgcccttagccattttttgaaattattttttaaatttaagaaaaactacttacatgtgacaaattacattgtttggtggtatttgttatgtgtcttgcaattagaaggaagctatcaaatgtggttttgttatgtgatgtttaggccactggaccacagtcagaagatgtgatggattatactctattcatgttcttgcccagtccccaagagcaatcagagtagctagaccatatcaagaccagagtaatgtgctaagagacattcctatttgacataccaccaatcacattgctttttgagtttatttttcttcaacagtaaggatgagttggtatctagctaaccatcttgatccgttataccttttataccatcagtcagcatttatgagactaccaggtgtgcttaaggcacaattgtttgttttagaatataatttttttatttatgttaaactagcacattgaacccacagctttgatttcatagaagcagagtatactttcctccacaaacttagacatgtttcttgggttctttctctctaagcagtgattctcccagccttcacatctacttactcggatgctccattgactgctcaaagcctgttaacttatgaactcaaaagcataatatgggattccaagtttggatgggcattgctggccttccttttaagatgtaacgaagggaatcttactgtcatcttcagggttttctgtttgtttgccttacgccctacggtattcttcaaaggctagtcccttgacagcataataaacctgagaaggtacaaagaaaactatcagttaaataagcatactgacaatctattgagcaaagaaggaacagcagtacatctttgtttccctatttaatttaaggcttctactagttgttcccctttgtattagaaatcctaaatatatatcctctatgaaaaaacaaaaacataaacatgtcatctgttggatgacacatcctataagaggcaaaaagattgcccctagaaaaactgaaagcagaggccgggcgcagtggcttacgcctgtaaccccagcactttgggaggctgaggcgggtggatcacgaggtcaggagttcgagaccagcctgaccaacatggtgaaacaccatctctactaaaaatacaaaaaattagcagggcgtggtggtgcacgcctgtaatcccagctactcaggaggctgaggcaggagaatctcttgaacctgggaggcagagcttgcagtgagccaagatcacaccactgcactccagcctgggtgacagagcgagactccatctcaaaaaaaaaagaaaaaaaaaagaaaaactgaaagaggagaaaaaaagactataattagatgggtgatcacaaatgtaaataagtctattactattcaaatctcattattcttatccactattttactcatttgattaaaaacaacaataaccccttttgttttactgttaacggttttctgttttattatgatgattatgtatatatggagtatataaatattttttctgctataaagtatcccagtggaaaaagaaaaatgagacttctctagcctttaaattcaatagccctattctattgaattccaacaaggtatttgttaatattattagtaacaatgaatttaaactatttctaaatgaaatgttgaattttctattttaggcaattattgtttcttacagaaaattagattattaagaactctactaaaattctaacagcaccaaattccatgggaaatttattttgaaagcttagttgtagaaaaactttgcctttggctatgtctgttttcacatgggagaaacaaaatgtttcctttaaagggtagaatggcaacaaattctcaatacataaagttgagaattgtaaatatcaggattttatcaagtatatagtacatatagtgtgccaactactgtggtagtcactgtacaaaagaaataaaaggtattgtccctgcccttaagaatcttctcttagctgtagattagattgaaatgcatgaaacagccagagaagaacccaagacttacttccttataacaatacagtctttttcctctgtaacttcagaataaattaaattttgtgcctatgcctaactttcactctttgaaagtgctttaatagattctttttggaggaaggagatcagacaatataagttttaaccactgagaaattcagtatcaacaaatatgaaactgcttttagcaaaatagtaatgtttatactttttattaatataattttaaaaacaaaagtctagttagtttttgctattactttcactaggcaatacttgtttttgaattttatgcatacatgcaaattgcaccatctcatattttccaacagactcatattctcaagaaaaaaacttgttctcagcaaagcccaagcccagataaatgcccctcatgacaaaacttataaccagtatattaactaataaacttcctaataagtatttctgttttataaataaccagagctcctggttgttgaacatgtgtttgtaatgtgaatatacctacgacactaacagtgcagactaagagcaaaaatgttccatttctcatccagtagaacatgcttggagcagaaatacagccagtgacctctacatacttaccaaaaggagcattgacagtatcttcattctgaagtcatgttcacatgattcagtgttattatcttaactacaaagacataaaaataaatttttccacaaaagaaaaatgcaagccagactgtctgtcatccagacatcacatacgaagggcaaaagataggcccccagtaagcagagcattgtagaaatatcagtcttcagagtcactcttgagtctgaatttcttctttgctacttattttgtatccatagtcaggtttattaacctcttgtaaccttatttttcccctacatcagaggttagaaatgagggctaagaaaatatatataaagtacttgctagagtgcctagaacatagtgagtttccaataatggtagtagctgcagtttatcatgcttattgtcacgggcctcgtttttttctttccctcagtgttagagctggttattcaataccctgagccccttttcatctccttaccactcaccttccttttggcccctgttctttactgcagaactcttcttatttattctctgatgactgccctaagcttcacataccacgctttcattgcttacttccagactgatatctccagtctggactcctgttctacatctccagttaaatgttgaagagacatctcacactcaacacatcccaaaataaattccttatatcccccataacctttcccattccagggaggtgttgagcaagaacccacaagtagggacagtgagaaaggaaataggccagccttagatatacaagcaaggatcccctgaatccctcagcctttgaccccagaaagtccctctgggataagaagagctttactcccatagactctgtatttcatgtgtacgggtgccccaaatcctgaccgtcatggtcatcaccattgtcttaatactggtgagtccatgcagtctaataggaagactcctggactaggaataagtatttatgggttctaattctagccccttcttaactttatgacttttgctaagtcacaacactctctgtgacttaatttcctctgtgatttaattaacagggggagctgttaataattaaggtggcaagcataaaccattactaagctaggcaaactaggaagtatagtgaccctagctatcactcagatcccatccagcattcatgatgtatgattttacgagttgccattcctacagtacagatgatgtgttacaaaaccattgtcgtacataactagtaaaatatatgttaatactaaaacaatctggcaattaaaatagtctattaatattaaaatcatctgttgttactcctagagtaatattaagttaaactggcttgtatggattagccagaaaacccaggcaatacagaaaaccttgttttcctgaaaacaattgtattccaagtctaaatagctaattttaaattcatctattagacactatcaatttttaaatttgtttgacctaaaacaatctccttcaggtttccagatggactccttggttctactgtctctgtactttacctagaaagtgtatattcacctatctctgccatcatttgatttattattttatagtgttcagttatatcttctcttgatctgtaacttttcagaggaaaatggtactgcttcatttatatataagccattttatatgcttcacctaaattgtttcttctgaaagtttttgatctctaacagttcccctcttggaactggagccacttttccaatctacatatgagtttcaaaaataataatggcaaatatttgtatagtatttatcatgagccatacaatgttctaggcactttatgtatatgaactgattgagtcctcacaacagcccagtaaggaaggttctgttatcatttcctattcacagatgaggcagttggcatagaagttaagtgatttgtccaagtccacacagcaagatggagactggctccagtctacattcctaaccactgtgttttataagaataagtttggggctgggtgtgggactcacacctctaatcccagcattttgggaggccaaggcggatggatcacctgaactcaggagtttgagaccagcctggccaacatggtgaaaccccatctctactaaaaatacaaaattagctgggcatggtggcttgtgcctgtaatctcagctactgtggaggctgaagcaggagaatcacttagaacccaggaggcggaggttgcagtgagctgagatcatgccactgcactccagcctgggcaacagagcaagactctgtctcaaaaaaaaaatgatgctttgttttgctcttagtgaggatcatagtttttaggatggcaacttctaaagatttacagctgcctcttctctgtggtttcattagatcttcaacttcttccagccaggcatattgccccagaaggatattcattccacaggatccataccgaatcaatgcctactgaagtcaagtaggaatccattccaagcacataaatatctcctgaatgttctgagagaaggacaaactgctatggaagttcaatagtgggagaggtttttctatgtggggaggaagttttatagtggataacaatttgctttgttggaatccatagaaaatgccgtttcagctaaaaggagtagcattaggcaaatgagaaaaactcagggtatttatggaaaacagccagaaatttcctggagttaaaaggagtgatgaaaaataaggttagaaattataggttgtagcaagatcatcaaggagcttaaagaacagatgataaagagtttagtttattctatagagtggtgattttcaactattttccactcccaacaaacttgagagatctgacacattcctctgatgcagtgtgagataatttatagggcttgggctctggcttccaccatcaaatacctgcatcagctaggcagtcactgctcaggcactgtttcccacctgtataaaggggctaagactagaccaaccttgtgggttgttataaggatgaaatgatgcatttaaggtgctattattttcatcattattgtcttattttttaatatcaacatcatcatcatcaatagctatggattactgggacagtgactctcttagggtggcagtggagcaatcagaacctatgaaaccagcattaagagtctctaccttgattctgataccttactccattccttggagtcacttttctagataaggaagaatgtagccatatggtaacaacatgactataattggaatcccaggataactacccagtagctgagcaagttaattagcttggcctcaggcaagttactttattccttggagtcttattttctttgcatataaaatgataaggcttcctttttgcacagcagttataatatttaaatacttgacacatagtaggccctcattaaatgatgtagttatgtctttttttttttttaaatcatgatgctaactcaaaccctgttcccagatggcatctcaaaggaaaaacctaagcaaccaggagatttaaacaggttacttaatcttcatatttcttctcactcctcaggatttaattctaccagattctaactgaaagtaggagctctttattttgtctatgtgactgttctgcctctgtctcttaattggtttctctgtctgtcagcttgggttgaaggagaagtataaagagaatgataaaggagatatgaagggagggcctatagttcctagaattttttttctagctgtaaaaacagctcctttaacttttggagttgatcaatatgcttaccttaagataggaagttaaagcaggtgaatttttgagattattttttaacagcctcgtgattgcatttttgttatgtgtgattatgctattatagcttaggttgtaaggtctcaaattgagacacctttctaaatccatatttatggttaattctttagataggtatgcttgggctccaggccagtgatgcacagaagatgaaatgactgtctgctttattggaggcacagcatgcttgattcctgtgaggtgaggcattgggaaagagctcttttcggtcttgtaaagcctgataaaggtgaaggtagaaccagggaagctcaaccatcttttctcaagtattctgcttaggacattgcttcctgtgctctgaatcctgctgacattgcagatatgatttagaggaattttcacatcatctacaaaaaaaatcttataactgagtgaaaccacataattgaaaagtgtaaaaataattactcaggaaatttgccagaataaaatctaggttgatttgtgaccctagaatattcaccccccacaaaaaaaaaacaacaaaacactgacctgaatgattctataattgaaaatgtttagctatttttaagaatagatattagcacaataccactttttaatttgaaagctaaacatttgtattagttcagtgtaacaaaggtaattaaattatatttttgtactatctagggaaatgtattaaagcaaaaagtttccaaagatttttgcatttattaaaagggaagcttaaagggtatcaaaggatggtgagaccgtcactcagtaactgaaataaaaagacaaagctgaatttttacttactattgtaatggagttatactgggatcaggcacaagcagagccaactattgatcttctgtagggttttagagaagcatggcttcaggaactggcaaatgttcaaaagcatatttggactaatgtcatctgtagaagtatgattacttgggtatgaccattgtttggttggcccctagggatacatttaatggaattgattagttcctaattggctacttcaggaacaaggactatcattgattggctagcttctaaagcatgttcaatgaggcaagtttattgattgaatgaatttaaaaccagttgtggtggctactcgttactgtggctaaagaacaatcagtcttttccaatgagtgtagaaacttatttattcttagttctcacttttgctcttcactcaggagaaataattaagaattatccagacattcaactctgttgttgattctccctaaagatgagatttcagtgtagagaactcttttcagtttaagtgtcaatcagcatgatttcatattctttttatctttgaatcatttgttgaaccatctgctgggacaatagctgtgcaaaagcatttgagaccggacaataagcattaagtgactgtaagacaaacaagaataacaagaaatattttaagaagggacaagaaggcacttcagtaccaagacataagatttttgaggcctgaccaagaaaacaagtctgtatgtttctctaggtagcttgactgccttttttttttctttttagcttagatataagttgcttcatttcatctgtaatgttagttcaggtatagcgtgaagtgttagcaatggtttaggttggccaagagaaaatacaacaccattgtattatctatagctataacagttaactataactatttgagttaaggaaattaaattgttcccccagggcttggactgtgttatttactgtatcagccaaagtgagaggtaaatcttcatggacaattttgaattgtcagttcaaattgtccaattgactgtcctgttgatggggttgatatttttaggcatttgttccactagttattgttttcccagaaaggactctaatgagacataatccatccaagggtactggggagtcatatccttgaattggcttaataactctgcataacaattaatcttttcctggattggcattaaagaaactaattcctacataggaagaaagagccaggaattgtacaagagagataatccgtaaagacaggaatggaaaggagagtgtgacatagaaaaagtttgttctaatggtcatgggtggaatctgtctgctttgtgtagtcaactctttgttctgagaatcttgggttaatagtcaattcccatggatcatctgcttctgaaggtatgctgaagaacctcagtttatgttctctgatgagttgttactttttagctctgccaaagtctctttcatttttccagaggatagcagaggatgtggccagttcaggctcatgcagggattctgttttattcatcactgaagtttcagcacccaaccctctgcctggcacagtaaatatttataaaatgaatattgttttttattatttgtgaattattttaggcatttcagttatgtttcttcatttcgattctgatatcccattgaaagcaataactatgtcttattctttgaatgcttcaggaatctcatcacactgttttctatgttagatataaataagtattcattaaattagatatattgagtgtattttgtatgggtaatagggaagcacctgacaaggttctctatctgaaagaggtaacatatcagttggagagattaaacatacacccataaacaatttgaaggtatattttttaaatgtaaaattacattctcaacaagtgtaataaaatattctatgaacaactacagtgatatgttgcttaacaatggggatacaatatctaaacttagaaacagtgcagtaaaaatatggtattataatcttacagaaccaccatcatctatgtggtccattgttaacagaaatgtcattatttggagcatgactgtgggtattttaacatcatggccagtttagaatgttaaactttacatttggcaggtcatggtggctcatgcctgtaatcccaacatttttggagactgaggtgggagaatcgcctgaggcttggagtttaagacattttatttttaagacatggggagacccagtctctacagagagagagagagagaaagagattttaattttatgatcgaaagtaaataggctgagtgtggtggctcatgcctgtaatctcagcattttaggaggctgaggcagacagattgcttgagttcaggagttcaagaccaccctggtcaacatagtgataccccatctcttaaaaatgaaaatgaaaagaaaagaaagtaaagcttcatagtgaagtactattatactatatacatcagggataatgaatgatctacaactctatacaacaatatagtaaatctcatgaacataaggttaatcaaaagaagccagacacaaactacatattgtatgattatgtaagtacaaagataggcataaaaggttttttaaaagtaaatgaagtttgataactaacttctgccagcataagaactaatataatgtaggaaatagcttgtgccttctaatttgaaaactaatgggtaggtgatcaggctcattttttcccccatttgacaagcccttgtttttaaatactttatttagaaggagaatatgaagaaatattaagtgtttgttaactgctagacaatatgtattttatttacattatctcattaatcctttcggtggtcctctgagatgtatatcatctcccctactttccaagtgaaaaatctgagaaaactgaaaacttaaaaaatttgcccaaagtaatatacagccagccctccacatccatgagttccacatacgtgtattcaactaaccttggatcaaaaatattcaggaaaaaaattccacagagttccaaaaaccaaaacttgaatttgcttcacactacattgaatcctcatgagtgaagtgatgtgttggcattatattaggtattatataagtaatctaaagatgttttaaagtattcaggaggacatgtgtaggttatatgcaaatactgtgccattttatataagggacttcagtatccgcagatttttatatccatggattttgctatctgcaggaggtcctgaaatcaatctccatggatatagagggacaactgtagtagttaagtgataaataagatttgagcttagccttatattactccaaagcttatgaaccaactccccagtcacaggagataagtaaaaggattgagaacaatctggttaattccattatttggtaatgggaagtgacaggaagaattcctgtactgtagggtagaggccacaaactttttctgtaaagggccagacagtaaatattttaggcctttaggccatatagtctttgtcgcaagtactcaactctgccataatagtgcaaaagtagtcatagatgatatgtaaacacataagcatggctatgtcccaataaaactttgtttatggatactgaaatttgaaatttatataatgttcatatgtcacaaagtaatattcttcctttgattttttaaatgttaaaaactaaaattattcccatcttgtgggccatatagggctagatttgccctgcaggctatcattaggtgaccctggctaaaggctgttgcttggagggctgcacacttctattcaatatacagagatgaaatctgcaatcttcaaagacaattaaaaagatcgacattaaggcatacttgatatacagtaaagtatacccatgttgacatatgtgtacacccatgtaatgactaccataatcaacatacagaatattaccttcacctccaaaaggtttcctcatgctcctttgcagtcagttcccctccatgccaggcactaggcaaccactggtttcttctctgtcactataaattatatttccctcttctagaattttatatattgaatctaagtatgtcctctttgtttcctccttttactcaacataatattttgaaacttatccatatggttacatgtattagtagtttaataatttttattgctgagtagtagtccattgtatgaataaatcacaactggtttatccattcacctgtgaatgaacatttggtttgtttccagtaggggctgttatgcatgaagctgctatgaatatgcatgtacacatttttgtgcagatatattttcatttctcttgggtaaatacctatagtagagtttctgggtcttatggaagtaaatgtttaactttataagaaactgccaagatgttttccaaaatgattataccattctgcattcccactactatgagagttctagttgctccacatccttgctatcacctagtattgtcaggctttctattaatacctttagccattgtagtggctgtaaaggtagtatcatggtgatcataatttgcatttatctgatgactgatgatagtgactatatttttatgggtttattaaccactcatgttttcttatgcctattttttttttaaattgggttgacttatggagttataagagttctttgtatattatggatactacttttttgttagatatatgtattggaaatattttctcacagtctatcaattgtctttttattttcatttttaaaaatattgtgtatttttgaggtttacaatatgatgttgaaacgggaaacgttccttgtccccctcacagggcatgtgatgggggtatggctcgcttcttccgtacaccactgctcaaacctctaggggagcatacagatgggcaggctgtggagctccaaacccacagcagtgtctaggggtgattgtttacagctgaagcaccagtgggcgtgtgttacagggtgctcttttagtttagctatccgtagatggtttatgttagctcagttagactcctgccttattgcaaggacagacggctttctgtatactggggttcttgccttggtgtaccagaagaatcagattacctgtgggcttagagaatgagtgcaaggttttattgagtggaagtagctctcagcagatgggggagccagaagggagatggttttccactggagccggccactcagcagcctgggctctcctccaagtgccccagccaaactccacatcattctgccagtcgatggcctgccagcatgccggtgcctgtcggtgtgttcctcctgacgttcagccgcccatctgtttctctgctgatgtgctcctcttgacgtccagttgcttgtgtgtctgcttgctagggtctcagggtttttataggcacaggatggggcttggcaggcaagggtggtcttgggaaatgcaacatttgggcaggaaagcaaaaatgcctgtcttcacctaggtccatgggcacaggcctgggggtggagccctagccagggactatgccctcctctacacagcacttcttctccaattccgtcttatttaaaggaaccatgcccttcccagcacttctgtatcattatccccctctgaagaggtatatcttactgccgttagaatatggacgatgaccggccttagctgtttcctgacgacagggggcactgttttgggcaaaacagcagtcagatttctcccagtctatctaagtgttcctagcaaaggggagccatcgtccaaggcttcggttgcctgaccgtttggagtttgatggcttctaggcatgagagaaaaaaaacaagttttataaggttaagtatacatgggttatacgtgtgttatacaaggaaagaatttagtgccaaagattacagagataagtgaaatatacgaacaacaatattgtaccttgaattgtatcaccctggtgaaagaaattaaaccttatatgggagcggataaacttttagaatgagagaaaactgttcttgccttatctttagcagttaacaggtgcactctgggaattctagggtttgtaggcttgcctgggggccattaaagcttctttctctttcctgcatttctctccctttgctgggcctccctgtctctattataaaagaccgaggtgactactttaaggaggttctctaaagtgctatctggtcccaggacctgtttttatagcttcctcctgatatcaggggctgcctgaataataaatttatcctttgggattagctgtccctcaactgaatcaagagataagagaggtgtgctttacgaaggcctctcttagccgctccaggaaggcagtgggattctcatcaaatccctgatcgatcatggacaacttagtataattgccgtctcagagaaggcttggtcttagttctacatatgccctctattatgcacacctaaggatgtctcctcttccagtcttccaccttgtcactgggatcccatttagggtcatacactggtactgcttctcttccaattggataatatttaccctcttccctgacactttacatgatacaaagctcatccccaaatctctctgctacttgcagaacagcctgcttctcagcgtccatcaggttctaattcaaaagtgacataatgtctctccaggagagttcaaatatttgggtgaaattctggaaagcctctatatatctatcagggtcatctgaaaacttgccaagatcccccatttgctttaagttctgtagggagaaggggacctggaccttactgggcccaaattcactgggcatctgttggaaaggcaagagtgagactggggcttgtttagagtgatgatttctaggagggggtaagggagaggctgaagttggatagaaaggttggggtggacccagaggagcagggcttgagggtgctggcttctctgctgggggtgcctctgggactcatgtctttaatttcctggccttgccacttgcagccttcctgagacagcaaacacaggggctaggtcaatcctacattgtcggcaaaggtcgggattgccttgcaaggtatagaaagcctgcacgtatgggacctcagaccatctgtcctcgcatctacagaaaagttccaattgccatatggtattgaaatgaatggtcctttcctgaggccaagccagtccttcctgtaaatcataatttggccaaacctttgtgcagagagctatgaggtgcttttcctccagattatgagggtcaaagcagtcccaatggttcaggatacactccagaggagtataagctggcggtggtgaagagaactgtttgcccattctgaaagacagggaatagaggcttccctcatttcccttccctctttcagcgaaaactcaggatgtgatggagagagaaagcgagcatcttcccttcactctctacctcttatccctgagccctggtgaccttggcaggtgctggccgtaggtgcaattgcagtatgtacccatgaagcagagaaaacctggagaataggaattaaacgctgtcacctatgcctcccattctccctgttgttggcaatctttgaggtcccagggactgttcatgccataaagcatggcctccttctgtggggtgggtttcagttggcaggaattggtcctgcccatttacattgtgcctattgcctggctttgaatccctcgcacctggtttttctttctagggcttcagcctgaagcttggaatcgagtttgggactgaaaagatatttcagaggctgtttgtatctgtttagagtgtctcaaatgagccctgctgaatttgcagttctcagccagcaggggtcattcctcccttaacttccatatcagaaacagagttgggagggggagccctctcacatggaaaaggaaaaaacagaaaaacagtttaaggggcaaaaagggggagattctgggggaagaaccccttgcttagtgcaactgggttcctctaattcttatatctttttcctggttcagactgggttgaattccttggccaaaggagaaatgttccattgacacagcaggcgagaagcgccctatctgttgaccccgtggggtcctggctaccactggttttctcctgccccccttgtgactgttgggtttggcttttgcctgctgcaggcatgcccaggtgcctgagctgggaggggtaagaataaggagaggtgccctgagccacgcatgcctgtgactgtcgaggtggaggcatacatgcacctctaggaaaaaattggtctgatttgcacctttggtggctgagccaaatgctcattttacttagtaacattgccgcagcctgtagcaaaactcttaatattataaagaaagagataagagccattttaaaccatgtgagagagagagaaaaaagagacaaagtctgggggttttgactggcccagttagggcggtttaaaactctgtgaagggaaacagagcctcttacccgcaggaaagagagaaaggtggtggagtttcggaagagaggcagacccgacagtttcacattcactcacaccttccacaatcctggatgagcccccagttgaaaaggtaaaatttcccttgtcctcctctcagggcacgtgatgggagtgtggtttacttcttcagtgcccagctgctcaaacctctaggggagcatacagacaggcaggctgtggggctctgaccccacagcattgtctaggggtgaatgtttgcaactgaagccccagtgggcatgtgttacagagtgctcttttagtttagccatctgtaggcagcttgtgctagctcaattagactcctgccttatcgcaaggacagagggctttctgtatcctgggttcttgtcttggtgtacttgaagaatcagattacacatgggcttagagaatgagtgcaaggttttattgagtgaaagtagctctcagcagatgggggagccagaagggagatggttttcccctggagtcgggccgcttggaggcctgggctctcctccaactgccccagccagactccacatcattctgctggtggatggcctgcttgcatgctggtgcctgttggtgtgttcctcctgatgttcagccgcccatatgttcctccactgatgtgctcctctcgatgtccagctgcctgtgtgtctgcctgctggggtctcgggggggtttataggcacaagatgggggcgtggcaggccagggtgttcttgggaaatgcaacatttgggcagggaaaaaaaaatgcctgtcttcacgtaggtccatgggcacaggcccgggggtggagccctagccaaggaccacaccctcctccacacagcacttcccttcccttcagcacttcccttcacctcttccgtatcatttaaagggaccatgcccctcctggcacttccgtatcaatgttatgaaatacatatagatagtaaaatggttactatagtgaagtagattaaaatatctgtcatctcatgtagttatttttttgtgtgtgacaaaaacagctaaaatctacttatttaacaaaaatccctaatacaatataattttattaactttagtccttatgctgtatattagatctttaaattttgcctttttattttcttgaccatgtattttaagagcagaagttctaatttgaatgaagttcagtttatcagtttttgcaaatgattagtgcttttcatatcctaagaaatctttgcctatccctcagttgtgagggctttctgttttagagattttctagttttagcttttatttgagtctctgaccattttgaattaatttttgtgtatggtatatgataaggcttgaggttcatatttttcagtatgaacatccggttgttacagcaccatttattgggaagactatcattctcccttgaattatcttagcatctttgtcaaaaatcaatttactatatatatatatatgcaggtctatttctagactttcttctgttccactgatttatatgtctattcttaagcaactgttgttttcttttgagccttaacttgttgttgattttagttttaaaaagaaatcatttacctttttttaaaattgcaaactcttctgtaggtagctctcatacatatatttttatgttgacaggtatagatatactaaataaccaaatgtaatgtagatgcttttgccactgtgatttctgccaaaatcaacatccttttattctctactctcaacatagagttttggcatttcaacagcagtagtaattatatctacaaatccttatgtgatgctctatctcaaaccttctggaagtccaagttgattatgtctgggttttcacacttgtcacttctcatagctgctttttccaatatgttaattaattaggcattttttccttttgttctctatgttctttctctaagcaatgactttagactctcccatgtcaaaacaaaattctttttatagttttcaaatttctcagttatttctttgcccctttctttaattccctctcaatatagtgagttttcttcttatcacagtttttgttttgttttcttaaccttttttatgtcaaaggagttcagagctatacttctgatttttttttacctgcaattaaaattttttcaggtagtttcactttctagagatatctattactcaattcctacagatttcaaaattatctttctaaatctgttttctgagaccatatgtcccctacttaagaaataggtctctatactgagcttagtcaagagagggatgttaggtcattgtctcatggggctattttttgtttttgtttttcagtttattgagttttgtttcttctcataaaacagcatatattccttattatcaaaattgctcacaatccccacactcaaaggccatcatcacaaataattttggtgtgtatgctattttttaaaacttttttaaaaataatttttcaaatttgagtagcgctttggaaagacactcaataaacagttttaagtaagcgaatatgcctttttccagtgaaatgttttgctgggcaacctgcagaaggcctatttgaagtgggcatggtagtagactcaggaccattttggctatgggcaaaaagggagcacataagttgtacagggcctagcctctgctgattgcacctttccttaatattctatggatatcaagagtattgtactaattatacttagcatatagtagaaaatcaatgtgttcatttattttagttatttatatatgcttcattcacacttttttttctttttccttcttcttgttagaaaccaagaaacaactttagtttgaatatttccttgatttttaggctatcatttcttaatatcaagtgacattagctgtctctagttctttgcattattccttcagaatgacatggtcagataagggagtgtccatggcaggtgtaactaggcaatagttaatgaacacccagccaagaatgatgatatcttttaaaattctaaattgtacattaactgttgaataaagaacaatgatatgtataaggtataaagaataataacatagtgaatgctagtgcacttaacctgtcagctcaaaaatacaacactacaattgccctagtacctacaggtttagaagacacctatgtgccccattctcttctccagaggaaacttttcatcctgatagctttcatggctacgttttcccttgttattttactgtgtgtatttggacacctaaatattgttttatttcaacatgtttttaagttttagaaaattgaatcatactgaatatatgcttaagcgactttttttgctcagcattgtatttgagattcattcatatatgtaagtattattcatctactatatttagcgggactaccattcagctattttactgttacatagtattctattgtgtgaatattccacaatgtattcaaccatttttcttttaatggactttttagattgtttttagttttttgctattaaaaatcaaggttatgaatgttatcatgtaggtctcctggaacgtattataagagtttattttgtaaagaagatcttaaccattttatgtcatggactccttgggaattttttttaatattatgggattcttctcaaattaaggtttttaaatgcatgcaataaaatacataggtttataaaggaaaccaactctctctctatatatgtaatgtaaaatacatatctacatatttttaaagccctgatttttaaattattagattcaacagatataaaattacatttcaagaaatacagccagaagaaacatagaggaaaagaaaagaatcacagaaactgtacacattgttcactgaaagttcttgtataacaatatagaagattgttattatactcacgactttttgtcttttcgcattagaactaaataaaaagtcaagagtgatatagaaattccctgcattaggcggggcacagtggctcatgcctgtaatcccagcactttgggaggctgaggtgagtggatcacctgaggtcaggagttcaagaccagcctggccaacatgatgaaaccccgtctcaactaaaaatacgaaaaaattagctgggcatggtggcgggcacctgtagtcctacctacttcggaaggctgaggcaggagaatcacttgaacccaggagggggaggttgcagtgggccaagatcgcaccattgcactccagcctgggcgacaagagcgaaactctgtctggaaaaaaaaaaaaattccctacattaaataactatgtgcatattttcattaaatgtcaagtacgtaaatatttaaaacgttaaatatgacaaatgaccttgtttcttgttaacttatctactctgctgtaacactattgacaaggataatgtatacgtaaattgtttctaggttttgttttgttttgttattaaaagagatgggtctcactgtgttgcccaggctgcagtgcagtagcatgattatagctcactgtaaccttgaactcctcggcttaaggtgatcctcttgcctcagcctcctgagtagctagaactacaggtgtgcaccgccatgcctggcttttttatttttaagtagacacagggtctcatcatgttgccaaggctggtctcaaactactggtttcaagcaattctctggccttggcctcccaaagcactaggattacagggatgacccaccatgcctggcctagatttggtttactgatgctcataccagtctcatagaggtgtgttgataggaatggaggaaggtatttgaaagcattattagaccttggcagggtgggaggacagaaagccagtgtggagggaagggagctgacactggctttaggtttgctgtagcagatttggtccagagagtcaggatgcctgatattactgagacgttaggaaacttaacacaactactacagcatcacagctattcccagaccttgaggctgttaactggctgaagaatgcagaatccagtcagctcttgtgaaaactcatacctactaaagactccacagcattgtatccttacaggaggaaaagaagggttggggaaaggggattctactgaattcatactgccaaagtcttacatgagtgcaacatggtgtaacctaatctctagctggaaccctactggtaagggagtctgagaattatagctctaggtgtttctctctctgtaagaaagactgtaaaaggagtgagaatggatgctgagtgccaatagtcaatatctagcacagtactcattcttcatagtttatttgtatcttctctttttatcttaagattatctaacatttattagtcttatttgccttttcagaggatcaactttgactttgtcttcactatcatgtttgttttctattaatgtttgtacgtacctttaatattttttcattctaccttaggtttattgttctttttctaacttctagatatgaatacatagctcatttattttcagtctttcttttctaacataaccatttaggtgctgcatttccagcattctacaattttgatacataagatttaattattgattagctctacatatttaataatttgcattatgatttccctttgacacatgatttaatttgaagtatattttaaaatgtccaaaaatatggggtttttttggtatctgttactgatttctacctgtactgcaattagggagtgtggcctttgtgacagtaatcctttgggattttattgagaatattcttattgcctagtatgtggacagtttttatgaatattacctatgcgtttgaaaaaaaagtatattttctaaatgttggctacagtattctgtatacatccattagatcaaatttgttgattgtatatttgaaatgatctgtgttttttcagattttatacagttgatttattaatttctcagagaaatgggttataacatctcccactaagatggtgactttctctttaaattttatttatttatttatttatttattttgagatggagtcttgccctgtcgcccaggctggagtgcaatggcacaatcttggcttactgcaacctctgccccctgggttcaaacaattctcctgcctcaacctcccgagtagctgggattacaggtgcttgccaccacgcccagctaatttttgtatttttagtagagatggggtttcaccatgttggccaggcaggtcttgaactcctgacctcgtgatctgcccacctcagcctcccaaagtgttgggcttacaggtatgagccaccgcacccggctgtcctgttttctcttttctttccttctggatctccaaatagatgtgcttgagaattactatcctacatatttatgctatcctccatatttatggcatctattttcatatttcccaactctttatatctttgtgctactttccattcctctagattcatctttcattacttatatattcaagtgtgtctaatgtgctattaatctcacctatttattgagttaaatttcagaggatgaaatttttatttctaaaagttctagttggttttctaactaatttgttcatttcttctttttctttaaaaatatgatacttatattctgtgccagatttttccagtgtctaaaatccttcaggttctgattctgctttctattatttttgctattagtatcttgtttcatttcatgtctatgtcatatgactatttacaccgagctcttgctctttttaagcattgatgctttttatttttaaattgacaaataaggattgtatatatttatagtatacaacatgctgttttgatatatgtattcattgtggagtggctaaatcaagctaattaacatatccattcctcacaaaattatcatttttttgtgatgagaacatttaaaatctactcttttaacaattttcaagtgtagtcatgtgctgtgtatcaaggttttggtcaataacagaccacatatatgattgcatcctatgattataatggagctgaaaaattcctgtcacctagtgatgtcgtggctgtaccgtcctagtgtgttactagttatgctgtacctagtgtgtacgctagttatctagtgtgtcccagttacactggtataaacaaacctgctgcattgccaatcatatagaagtctagcacatttcattatgtatagcacataatacttgataatgatagtaaacaactgttactggtttgtgtacttactactatattcaaaaaagtttaaaagtaaaaactcaaaaatagaaaaaaaaagaggagaggcaaagaaaaaataaaaataggaaaaagcctataggataacgatataaagaaggaaaatatttttgtacagctgtacaatgattttgtgttttgtcattacaaaagtgtttaaaaagtaaaaaacaattaaaaaatttataaagtaaagttactgtcagctaagttaaatgattagcaaaaagatttttatatgtttagtgtagcctaagtgtacagtatttttaatgtctacattagtgtatagtaatgtcccaggccttcacattcacttactactcattcactgactcacccaaagcaacttccagtcctgcaatcttcattcatggtaagtgccctacatggtaagtgtaccattttttatcttttatactgtatatttactgcaacttttctgtgtttaggtatacaaatacttctggttctgttacagttgcctacagtattcagtacagtcacatacatgctatatagtttgtagactaggaacaacaggctgtaccatatagcccaggtgtgtggtagaccataccatctaggtttgtgtacatacactctctgatgtttgcacggtgatgaaattgcctaacgatgcatttctcagaatgtatccctgttattaagcaaagcataattgtatatgggaagatatgcatacgttatatacaaatactacaccattttatgtaaaggacttgagtatccttggattttggtatccttgcgggaggggggtcctgcaaccaatcctcccctatggataccgagggacaactgtcctcaatttgggattgttagaccacataggtagttggatcctgcgcaaatccatgtaagggtcacattgtggttgtaaatttttaggggagacttttttcccaccatgttagtaccacagtcagataagtttctttcctgctccttctgtgggggctggtttatttcttattcagaggtgcagctttttattttatgtgaaaatcttcttttattagactctctacctgagacaggccttgcttttgtctcctgtctgctgtgccctgtgccaccatcaaaaccagcagaggatgcctccatgtcccctggagaggcagagggcacaagtggcccagggcagccgcctgctcaggatcctcagagtcttaccctggcatgctgtttccctttgttttgggcctccaaggattcctttccttcgtgccagctcagtgatgcactttaaaagatagtttttgtattttattgaacattttacatcgttttctgttggtaggtcatttggggtattttgtttataatgctgctaaaaatggaagtttcatcttggtctttttttgtgttcttgttttttgggttgtgtttctatttttgttttttcgtatctacaagtagaaacacttcgttctcctttctggctgcccccagtcagtgcccagcaggggtaatgtggtatgggagaagcagtgtgggctttggaatcaaacagacctgggtttgactctaccacttgctagctgtgttaccgggcaaccacttcacctttctgcatctaaattttctcttctgaaaatagagataataatacccaccatagtacccaggaggaaaaaaggtaggtgatcaaacattagttttcttttcagcgacaccatttatttcccaccttcccccacctgccacccaacaaaatagttcaagccaaagaaaagatgcttatatctgaatataaaagaagtagactgaattcctgttgattgataatgctaaattattcttagcagacatttaaatatttattagatttatattagattttaatgagtagggtttccagcctggaaacctggattagggaagcatatttttgtaggggacatgaattcaacctttgtaaagctaggggttaggaagaactgtattaatttgctacttctcgggtttatttgtatcatatttctaagccttcctctcccaaagaaatcatctttcttcacactatatacaaggtgtttattggcagttgaggcattaaggggatgctaacacaagggaatgttgattctagctcaaagaaggagctggctgaaggaatcaatatcatccaaagcaaatatatatattttgtactttatatatttatttaaattccaagaaatatatttagaacatgcataattagctgaggttacaaagttgccttttcaaaaggcatatttacctagagaggttatgcatatttcataaagaacaaacagatgatataaaaacacagtctacccttggtgtgttcaatgtgctttcccaaggaaaagcctgcattccttaaattatcattcagctttaaaacaaaaaatgttgcatttaagaagtgtctgctacttattgtcattttaataatttattacacacagagttccaaggaaacagatatcttttgctgacttgcaaaaaacgaataaatttaaacccgcttgaactatgtcatcacaatacctttaaaaataaattgcacgggaagaaaactttattcatattgtataagtaaatccaataaatggaatgagaatgtgcaaaggcagagagggaatatcacaaaggtgaatagagcaatttctgcatagttgacaatgaaatttcttagctctataatttagagctagaacagactatgaagacataaatttattcgttttaaagactgagggatcagagaagtgacaaatataactggttagtgttagaaaccagacttctattccaacaatcttttaaataaagtccataaattctgagacagtgtaataattgatgtattagtgatgatggcaccaatatttacttagtacttactataaaccaagcatttgcttagccctttacctatattatcttgtttaattttggcaatcagtccatcaggtaggtaatgataacctcattgtacagatgaggaaactaagacttggagagttttttttttcacttgttgacagtaacagttattcagtgatagagcttcttcaatagcaaacatttgtttcatttgtcatgtataagtattttgctagaaaccaagggatcaaacagaaagaagacatggttttcttctttcggggattgacacattagatccctacaacctaacatgtaagatgtatctgtaagatgagtagtgtttttttgtttgtttgtttgttgtgagacacaatcttgctctttcacccaggctggagtgcagtggtgagatctcagctcactgcaagctctgcctcctggactcaagggatcctcccacctcaacctgagtagttgggtctacagggggctaatttttataatttttgtagagacagggtcccactttgttgcccaagctggtctcaaactcctgggctcaagtgatccacctgccttggcctcccaatgtgctaggattacagatgtgagccaccatgcctgactgagtagatttcatatgttttgaccacagcacttgtaagaaatatgtttattctgaaacatatacatacataaatatgtgtaaattcatagctaaaagttttatgaaatacccttacagtgtgttacacatgctactttctattctagtccattctattctatttcaattttttaacagccagttgtgactgggtgcggaggctcaagcctgtaatcccagcactttgggaggccaaggtgggcagatcacctgaggtcaggagttcgagaccagcctggccaacatggtgaagccccatgtctatgaaaaatacaaaaattagccgggtgtggtggtgcgcacctgtagtcctagctactcaggaggctgaggcaggagaatcacttgaacctgggaaacagaggttgcagtgagttgagattatgccacggtactctagcctggacaacagaacgagactctatctcaaacaaaacaaaacaaaaaacccatttgtatttatatggatatatacatatatatttaaattctgtgtgtgtgtttgtgtaaaactctttaactactaaatagtcctccagagctcctttagctatttattttgttatttatccctatattttgtttggattgctaattttgctttattaacttgagaaattatctattgacttctagttgtcatagacgaggattttgctaccttgccctgtgccttatttccccaccttccatcctcctagtgtagtaatgctcaatctttttttaataaattgttttattactatgacttataaatgtcatttctcacagagccatgtagtgtattctattttctttccctttatctctttttaattttcttctggagatcattaccatatttttccacttgcatagttttctacatttctgaattttttattttatttttttttcttttttgagacagagtcttgctctgtcgcccaggctggagtgcagtggcacaatctcagctcactgccacctccacctcttgggttcaagcgattctcctgcctcagcctcccaagtagctgggattacaggcgtgcaccaccacatctggctaatttttgtatttttagtacagatggggtttcaccatgttggccaggctggtctcaaactcctgacctcaggtgatccacctccttggcctcccaaacagctggggattacaggcgtgagccaccatgcctggcctgaatttttaaatttcttaatttttttttttgcaagtgctccatcaatagctatcacatacctaaattagtgttttgcccctcaaaagtttattatatcagataatttgcccacttgcctttatcatggagacctggtatccagagcattccaccttcctggtctggctttggtgccccgggccactgcacagctgtcatcctggaaccttctctcactgctctgttatgttgcctcttccatttcctgaatcccatttttctctcggttcaagccctcattttgcttcaacacattttctagatagttccaaaaaagagaacatgggagaaatattttctgagtgcatgcattacttaaaaggcctttcatttactctcaacacttgactgataaattgggcacagatgtatagattggaaatatttcactctcaggattttgaagatgttactccttgtctcccagtattgctgttgaaaaaaatcagattcttatttcttcataaataacctgtttttaaaaatcatagcaaattttttaagttcttccaatgtgccaaacactgttctaaccattctgcattatttaacattcacatcacatctctgtcttgaacggggaggagactgagacatggagaggttaagtaacatggaagtaggggtgggctgttcactggatgctttactattaaaggacatggggactgaccatttaactgggggcctccaaatgtgagcatctgctctcctctctggaggtcatcctcctgcctgccactgttctcagaacaaaatacaagtctagaggaatcctctggttaggtatgcagactctcaattatccctgattctcagctagtacctcatagtttctagtgtccttgagtcctgcatctctaccactcagtttctccagaaaacatccttctattttcctacatggagaggacagtttgcagaaatggtgaatgtggagctagctctacacacagacatgtaagtaatcttttggccttagccttgctttcagcctcagcaccatctaatacttccaagtccaaacctttcgtggattctacaggacatactgacttcttttctcatgtgtccctctcagtagatattctaagttgtagctcatgcggccctggtcagtgagttaccattaacacaatggtttacattttttaaaattatgaaatataaacatacaggaagtaataggaaataagataacaatgtatttaccactcagctttatcaatgatccgaagcaaatatttcaaaataaataaaaatgcatcatatatatggttggtaactcctgtttatcccttcttgtgctcatttcatccctccctaacagttatcagcattctaaattggcatctattcttgccattatactaaactatttattatactattgctacaaatgtatatatctataaacaacatagttttatacttatacactttattaaaatgatatgcatagtcttgtgcttttgagatatattcatgttgatttatatagttcattttcatttatttttgcttctatatagtgttcaattgtgtgacttaacagcgaatttagccattctgtgtcaatagatacaattttttgctcttaaaacagacgtggtgaatattcttgcacatctctcagtatgcttgtataagaatttctctgtatggtttccataagtacaccaagatactggtcttctcagtccttagggtagcaacaggaagacctagagtcagcagagcccctgagctagtatcctttggccatgaacaattttatttttccccagtggcacaggaaaaaaaaatcattatttctatgtaggattgctgaactaaggagatacacattttcacatttaatagatattaccaaattgttctccaaagtagttgtaccagtttacgctctcatcaatgtaaagttctatttttactaaaacaaggtactgtagtgatggttgagagcatgggctttagtgttggactctgtgaatttgagcctgactccacctgcaagctgtgtgatcgtgggcaggtttcttggactttgccttagctttttttatatgtcagaggattagtggaccatatgctctctgtgacaactacatagccacttaacctctccgactcaatttctccaaatgaacattaggaatagtaaacctacctacttcctgagaatgtggcaaggaataatcggctaaataggcaataagtaaacaatgggttgagttgcgttccaataaaacgttatttacaaaaataggtggcagactgaatttggcccatgggctgtagtttgccaaccttactctagaaaaatcattcagggcaaatattatacaataaattactaaatggtgtatgtatcatataatatataaatctgtgtatataagtatgtatttaacacattgttaatatgtaaacatgtaatattataatatgtaatataaatttattcatttatttttcttgctaatcccagagaaattagctaccctcattcttttaaaagctattgtttcctcctgtatacattacttattcaatcagcaaatttacctccatacagaaggtaaatttacctccatatacttcagtaattttgagtttactgcataacttgttctatttatagatagccaaattttttttaagttctgcttttggtcttttcttccttaacctaacactctactctctgaagcaacatattatatacctagcgtctgctgacatgataatctttgtcttaagttcacatctcctaccctccttgcccaggacaaacaattcttattctcataggaatctcctatatgacactgtctcaagctgatttgcattccgtcaatcagatgttgtctactttttaagttagtcactttgctaggtactgaagacgcaggtgtgaaccagtttctctgaaaatagggcatccaaaacagagcctagatgtggcctggctcactgggggggtcccatgggatgactctctttctctcagtctgtgcactatgcttttagtgatagaacttgacatcatgctgcctttttgcctttcctttcatcccccaaaccaaggctcttattatttcgaagtaagtttggcagatattaggccccatattttcttcaaatgagaatactaggctcagagtggtaagaaatttacccaaaggcagaactgaaaatcaaatccagattttacaacttcccactccaggattctttctaatatttcatgcttcctccatacccaaaacacattgtcctagcaaaactttatatgattccaaaacagtctctaccagtgaaacactaatgaagaattgaccacatggaaaagacaatagggcttaaagtacaacctctctctgacagatgtccaaaggcatgtaaaattcatgcctttggaataggtacatgtcttcctacgtttggacaagccactctccttcctggtaaaggtgttgttagagctaaaatgatagcacacagcagtttgggtcccaaggcaaatgcctcacacccacggcctacttgccaggttagtgaaaggtctcttggcctagaccgtggacctggggtgggcttcctcctgcacataccaggggccacaaatagtaataagaataatcctgttaaaatagactaataacagacatttattgaaagtttattgtgtgccaggcactgaattatttagtatattatttaatcctcagaacattcttacaaggtaagtaccattttaatgttcatttggatatatagagtcagaaaggttgagtaacttgccttcagtcagctagtagacaatagagaagggctgtaaagaagtgcttttaaccactgtgctatacttgccaacttgtccaaaaccatgaacattatcctttctagtcccaaatttattttgctgcttcaggggtttgaaaatttaaaaatcccacagaaatatgaactaccatcagagaatactataaacacctctacgcaaataaactagaaaatctagaagaaatggataaattccttgacacatacaccctcccaggactaaaccaggaagaagttgaatctctgaatagaccaataacaggctctgaaattgaggcaataatcaatagcttaccaaccaaaaaaagtccaggaccagatggattcacagccgaattccaccagaggtacaaggaggagctggtaccattccttctgaaactattccaatcaatagaaaaagagggaatcctccctaactcattttatgaggccagcatcatcctgataccaaagctgggcagagacacaacaaaaaaagagaattttagaccaatatccctaatgaacatcgatgcaaaaatcctcagtaaaatactggcaaaccgaatccagcagcacatcaaaaagcttatccaccatgatcaagtgggcttcatccctgggatgcaaggctggttcaacatacacaaatcaataaacataatccagcatataaacagaaccaacgacaaaaaccacatgattatctcaatagatgcagaaaaggcctttgacaaaattcaacaatgcttcctgctaaaaactctcaataaattaggtattgatgggacatatctcaaaataataagagctatctatgacaaacccacagccaatatcatactgaatgggcaaaaactggaagcattccctttgaaaactggcacaagacagggatgtcctctctcaccactcctattcaacatagtgttggaagttctggccagggcaatcaggcaggagaaggaaataaagggtatttaattaaggaaaagaggaagtcaaattgtccctgtttgcagatgacatgattgtatatctagaaaaccccatcgtctcagcccaaaatctccttaagctgataagcaacttcagaaaagtctcaggatacaaaatcaatgtgcaaaaatcacaagcattcttatacaccaataacagacaaacagagagccaaatcatgagtgaactcccattcacaattgcttcaaagagaataaaatacctaggaatccaacttataagggacgtgaaggacctcttcaaggagaactgcaagccactgctcaatgaaataaaagaggatacaaacaaatagaagaacattccatgctcatgggcaggaagaatcaatatcatgaaaatggccatactgcccaaggtaatttatagattcagtgccatccccatcaagctaccaatgactttcttcacagaattggaaaaaactactttaaagttcatatggaaccaaaaaagagccagcattgccaagtcaatcctaaaccaaaagaacaaagctggaggcatcacactacctgacttcaaactatactacaaggctacagtaaccaaaacagcatggtactgtaccaaaacagagatatagaccaatggaacagaacagagccctcagaaataatgccacatatctacaactatctgatctttgacaaacctgacaaaaacaagaaatggggaaaggattccctatttaataaatggtgctgggaaaactggctagccatatgtagaaggctgaaactggatcccttccttacaccttatacaaaaattaattcgagatggattaaagacttaaatgttagacctaaaaccataaaaaccctagaagaaaacctaggcaataccattcaggacattggcatgggcaaggacttcacgtctaaaacaccaaaagcaatggcaacaaaagccaaaattgacaaatgggatctaattaaactaaagagcttctgcacagcaaaagaaactaccatcagagtgaacaagcaacctacagaatgggagaaaatttttgcaatctactcatctgacaaagggctaataaccagaatttacaatgaactcaaacaagtttacaagaaaaaaacaaacaaccccatcaacaagtgggcaaaggatatgaacagacacttctcaaaagaagacatttatgcagccaaaagacacatgaaaaaatgctcatcatcactggccatcagagaaatgcaattcaaaaccacaatgagataccatctcacaccagttagaatggcaatcattaaaaagtcaggaaacaacaggtcctggagaggatgtggagaaataggaacacttttacactgttggtgggactgtaaactagttcaaccattgtggaagtcagtgtggcgattcctcagggatctagaactagaaataccatttgacccagccatcccattactgggtatatacccaaaggattataaatcatgctgctgtaaagacacatgcacatgtatgtttattgcagcactagtcacaataacaaagacttggaaccaacccaaatgtccaacaatgatagactggattaagaaaatgtggcacatatacaccatggaatactatgcagccataaaaaaggatgagttcatgtcctttgtagggacatggatgaagctggaaaccatcattctcagcaaactatcgcaaggacaaaaaaccaaacgctgcatgttctcactcataggtgggaattgaacaatgagaacacatggacacgggaaggggaacatcacacaccggggcctgttgtggggtggggggagtggggagggatagcattaggagataaacctaatgctaaatgacaagttaatgggtgcagcacaccaacatggcacatgtatacatacgtaacaaacctgcacgttgtgcacatgtaccctaaaacttaaagtatagtaaaaaataaagtaaaaataaataaataaagaaaatccccctactctaggtggatcaaagaaaaaaacatttatctggtcccaaaattcaaagcttcacaaaagtctttatattcctgatattctagaaaatatttatatacagcatcttcatgtttgaataatcttttaaaatatttccattttatgtatatatctatctataactacatagatgagccatttctaaatgcatttaccttctagttattggtcttactactgcactgaaattttccttgacaagtcaaaaatggccttataattagtaaacgaatggtcagttttccatctttatttgatatacctgcagcaggagactgttaaataattccttatttaaatttttatttccttcttcataatgtcttcctttttcacaggtttatcacatagaaaaacagtcttttggaaactgtacagtgctattaaaatatccaaattattatggctattgggaggctagaatgagatctatatgaaaagttgaagaaaaattttagtacctgtaaacatacatgctgttttttttcttgtgaaatgaaagtattcttgtcatctaagtatttcttattttcaagcatggttcttgacttagacacatacggtcccttccagaagccagtggtttaggcttgtggccatgtttcatgggctaggaatgtccaggcagccggagtaatctctgttgttctcttctaggtatttaccttgctgtggattgctgactggatggtccatcacttctggaggaaaggaaaggacccggatagtttctccatcccctacctaacagcattgggtgatctgctcgggacagctctgttagccttaagttttcattttctttggcttattggagatcgagatggagatgttggagactaataaattctacaaactgctctcaagttaccaaggaagaaaatacacgacaaccacttatggctctttttcaaaactcttaaatcagtagtttgacttttgccagggtaatcttcagttggccctgattcaattaaatggccttaatttttttttaaggaatttgtgtcaaaaccagaatgaagagtattcgtgctgcttttcatagaataaatgataatttgacatagacatagatataagttccagctctgaaattaattaggaaagaatataggatgtttacagtgaataattttaaaaccacaaacatagcagaaatgtactttattattaaatttgtaatgcaggattagaagaagcagagctctagtttagcctttcttgtctcacagatgtgctgtatcccaggcatactataaaacgaagagtgcccaaccaagctttgaatcgtattaacaatgcccacctctatgctagctgaggataaatttaccagttgctcatatttaaactgacctaaatatgttttgctgagcataagataaactcacttttacctccatctaaaattatcctgttctgatgccaattcaatttcagctctgcaagttcttgtcaggctaatctttaaacattgagtgatcttgagagattgttaatgaaagcagtgagtcattttttgatgattgatttgttggaaaaatgttgatgtgttttaaaaaatgtaatcttcaaaaacagaatataacctgagatgcatttgtagagacaagacggtacgagaatgtgtgtgtgtgtgtgtgtgagagagagagacttttgatgaagaactaaatcttggattgctgatagcaaagatcatagtgctgttggaatatcagcaatatagagttattcttaaacacattctattaacatgtttttgtcattgggtccaaaaattttgctgctgaccagaatttactatttgttacctatattctttttttttttttttttttttttttttgagacagagtcttgctctgtcgcccaggctggaatgcagtggtgtgatctcggctcactgctacctccacctcctggattcaagtgattctcctgcctcagcctcccgagtagctgggattacaggaatgcgccacaacgcccagctaatttgttacctacactctaattaataattaataatttcttattttaaaaagtagtactatttaatataatcaagataggagatttaaaatgagcaagtgattcatttgctcttttaaagaagcccgttgacttacgcttttaaaaaagaagttggtgggttacctcaattattgttcatgcttaaacatatccatttgtacaggcttatttctacgtgggacccaatcatatatactatatttctcaaataatttttctaaaactctggcctatattctaaacacttgaccaacaccttagttattgaataggtaaccatttttaaagtacatgtggttcattttttaaaattcaatctctcaagaccgttagatatttaataatttaagctgataagggtatcaaaatgcacattaactttgatcatcatgatttaagttgtaactttgtgttattatataaatattaggttgtttataaatatattgcagaaagtattcttgttaagctcttttaaatgaggggactgtggtttagagttatatatttttgcttatttttaaacttcaattattccattcttctgccttataataaaacttttaaggcagagaactgaactaattatagaatttctcctttggagagttataatgttacatagtgaacattcttataaaagaaagaataagtttaagttgatgaatatttagctgcaaagattttttacttaaaaaaatccatgaatatctttgattttattataaagcatttgtaaattatttgcatttgagctgtaagattcataaacatttacatttcccaatgatttctattttgatttttaaaaaatatacagggcaagctacatttttaaagcattaatcaacaactttattatattacacattccagtgcacaaacacacaatatcatttaatactcacagtagtacctgtgaaatatatcagatggatattcctatctctattttacagcagaggaaaccgaaattcagagaacttacatttctaaggttgtacagctgcaaaatgaccaaattgtgaagtccctaacatccaggttttcataatgccagtactctttctatgacatgtttatgaccctccaaatgtaccaaaactacctaactaattcactgagaggaagccaactgcaaaaataggatttttaaaagtacaatagagtattactacattttatggatttcagacaaagaaacctccgtttattatatcctgatggtgagtattgccagctctaaattattcatatttctaagaccaaggaaaatataggtaaatgaaaattttgaaataaagaacaatgccttaatttgtaaaatctatcattgctaccaccctgcccaggtctggccatttgccataaatgctggtaaataaatacaatgactgatagagttctgtctcctttctcttttgctacccaaccttggttagagcaaccaaatgtctaaaaggcatgtaacaggagaaaaaaataaaaacattagtcaccaattcgccgattataaaagggatgtagattcctttaaattattactgaccttttgaaagccttcacgtaagtatgcaacagataaaatgactcatttacccacaacaataatctattatcagtcttaagtaatgtgaattcactgtatttctttttatacaacataaaaacttctgctttccaaacttcttccttttcactaatttatcagccactttatttatacacagataacacttttagaaacatttttctttcttgtccatttttttctttcaaaaataaagtttcttagaacctgataaaatggaaacttatggtaatatgtgttctggtaggtgtccaaaaattccacaccatagactatcaatgatatagccaaataaaggccattcaaaaaaatcagtaattgggattccttgccttatatctatggtatagtgtacccatttataacggggttctgccatcttcgaattgttttaaactcaaataaagaataaaatttaagaaataattatccagtcttgttatgcttacttcttgatgaactagagaacatcaagccagtgtggaaatctcccagaagagactggggtaatttatgtatacatatgatatttatgaattataataaattgggctttgaccatatctagacctccaatgcattgctttactactttttgactgtcaaatactctcctcatttcttcactcctctcattatccagcttacattgcttggttcatcagtccatacatctgcaactgcctctctcatgctggcaggacagaatacaaactctggataaagacagctctctgtgttttgcctgtacctgagtgctcaatatggctcatgaaaaacacacaactcctctgacagatctttaaatttataacctcagacatcaagttaacccccaactgcccagcaacctactctgtttctctaatgactttactttctgagagacaggtctttgtccccagcactttactgaaagcaaacttgttgtcaacctaaatagtaaacagagagaaggtttctaaaagaaaatgatattcaggaataggcattgcaatgggaatacacgtgccacagtgttcccactgcatatgaactacctgcatattcagggaggtaaaggaaggaggaggtttttaaagaaggattacaaattattttgagataattatccttggctacaaggatcgacagcaagcataacgccagtctgaggttgaacaggtgtttgctgggcggatattctcacagaagtattttttgtgtgtaaggttgcaatggccattgtacaaggttgtggtttttgcagagtcttttgtgatggtttttgttactgggcatttatgcatgagaaacctttcttcatggccttctctggctctatttgtcagagttttattaacacaagtgactccattatgtttctgacaagtttcacatttcccccttttgatcaagatatttctccaaaagcatcactgaccaatcatcctgtattcaggtgttgatagctcctgatgccaggatgggcccgtcctgggttgctgatctggtcctatgttagagaaagtgaatggtggctaggagtccgtgtcaaaaccctattatccacgtttgagcaacaagggaggtttgaagggagtggatctcaggctaagtctacctggagtccattattaagttcaattttttctgttccatagtcgtttgctgttatctcaaagtgctgggccagcattgttctgttaggagttctacttctgcaaaaatttaacaagtaatagtgcaaactttaaaaaggaaataatagtaatttgaaaatccctgtttgcataatggttttgagctgtgaatctaggcttaaagacaactatttgaatgaaacaaatgaccatagggaattaggtaagacctgttgtaaccatgtggctatgtttttattttgcttatatgggtttcaactttcccagagggatttatccgggtacagcatgcaatatttgcaatagcacagaaattttcttatttagccagtaaataatatagagctatttatcatctagtatcccatgactgggttgaattaaagcaaaaggtgagcaccaattgtattaaggatgttgccaaagtcacccaataagtgggctaaggaatcttttagattagtttctgtctagttactggcagaagctactgattaagaaatttacaccattatccagccaagtgaaaaaggtagcagtaagggaggtcagggtcttgttatgatatagagtcttgtgccaatatcttgggaaaagctgtctacagcatgaaaatgtcaatttcttatcctgtttgcagtttgaatgtctctggttatggcattaggcagtttggtgaactctttgtgtggctcatacatcaggcacaagacttgttccttaaaatttatcatttcagcttatagagatttaggaacagagcagttcctgtttttagtaattccatggaagaaagttggattaaaggaatataaaagaattcaggatctagtctactctataggtaaataagaacctgaaaacaatgcacagagctataatctaatagcagatgtattatagctttttctttataaatataactatttctgcctatgttgatcacacaggaatctcagatttaaaaacctcttgaggctaggaaaccaaactaaggaagactttagatgttacctacagtcctaaggctcctgagcctgccaggaagtgagtttttattcaccgtaaggctgagaacccttgaagtcaggtattctatgcatattctccaatctatttcactcaaagccttggtaatataaccagtattttcattgtatccagttatagaaagcagatttttactgaatttatgcaaataaccatgaatagttcccacattttggaggcatcaagtaggtagaaaagcaattgcttccatctttgttcacacgagtacactttaccaaatttctgtaaactatggataactaagaaaaaaaaagttccttcaatctggaaaataaaacatttaagaaccaataatgtttcaactaaacataaaaacatcttcatcagttacttaatctcatgtaattaatttttgttttgcttgatcttatctgttttatgaacccatcagtttcttcattaaatttttgaaaattttttatgtagtccattgatcttacagttattagaaacctgtatttaagagtagttgttagagtatttttcatgaaactaattgcaaatgcttttggagaaaaatcaaaacaataattgtgaatgacagagacttaaaatagccatggttaagaatctgactttgattcattacaatcagcaattgacaaggaaatttggttattttatggcatacaatataataaccagaattatggccaataagatattagatttctaagagttttgtacagttggggacattcatatcaataacatacccataaatgtaactgaaagaaaacctagcatcacttatcatttgacaatacttcccatacaaacaagcctagtcacttaatatctctacaagatgaaagatacatcctttgaggctctccagtggcccacatggaaaatcctgaagttaattctaggtcaaaaagatttaatttagaatgttgatcctggagaagcctgccaaagatgccaaaaagttcaaaatacttgatcaaaacaggatcgcaggtcactgtgaaataatagccattcatttaaccagagtgataatccaaagacttcaaaagcaataaagtttcataaatgtaaaaaaaaaaagcaactttttcaaagctcaatttttctacataataataaaaataaagataacaacaggaaattatcttggtaaatataaaatatttgctttttaggccagttaccaaaaataaaaacctcctccagtgtaactgcttctccttatgggaagcctatttagataatctggaagtcaaacctcatgaaagggtacttgaacttaatcagacacaggaagagtgtgcccaaggttatgaatgtataccatattatagagaaatataaacaagaaaactagtaccttgagcaggggaatatatgtctcttactaacatcatcagaagtttcctggttacatggaacaattcagacacattaagaaaagccaacagaattaagttatactagaagaaaacactgattttccaggccttcaggataagcattttactgtcaggttataacgacagagttggagctggagaaaaaagttaaggaatgacaaaaaagttgaaggagagagagatcatctcagtccttctcaagtagagaaagaagaacaggaggcaagatgttatgacctgcaaatcacatgtcgcaagatagagccaaagtcgaacttctgagaaatagatctgagaagcttcaacaggaaaactctaccttgttaaatgaaattaccaacctgaatgaagacagcattttcagcctgaaactagggacattaaatgaatgtcaggaagaaatgtggcagaaatagaaactgtacagtttagaaaatgcctgctaaagaaacagattttagaattaaaaataaaaatgtcttgtaatttttgctaagagcagatcaaaaatttgagaaaacctggctattctagcataggggaccaaaaatttaattttgtattagtgtatttttaatatcaaagttcaatctttagaaaaacttacaaataattcccttctaattgtaaccaacatgatcacacaaaaattgcttttataaattcattcttcacaaaccttatcatgatttactcagacactcgatatgcttagcttttttgctttgtcctctacttcgtctttcttaaataaccagtcatttgatgttaggacaaaaatatgccactcaagattctttcttatacaaaattattctcttcctcttaaacttccttaccaaaaacatatcttcactgtcaaagtcaccaatagcctccacattgccaaatccaatgatcaatttctaataagaattcttaccttatttaatctctaaagtcatttaacagaatctccttccatcttgaaatattttctttactttgcttccaaaagtctgcccttcgctttctttccttaccctactaaaagccccttctcagtttgttttgctggtcgcttctcttgttctcaatctctaaatgttggaatgctctagggctcagttttatcatctcttctctatctactttctttcccgatgtgatcttacccatcttattgttataaatatcatctgtactgattattccaaaactgtctagtcccaacctctcaactgagttttaaatctgtatttccaaatacctgccagacaactctacttgaatgacgactaggtatctcaagcatttgaacactctcatccaccttgacctaattgacatctgtagaacactttatccaacaaatgcagaatacatattgaaggttaatctccttggcaaacaaagaacttttataaatcaagggaaaaaataccagcaacccaatagtaaaataaccagaggagagatggttcacagaaaaaaaaatttaataccactcaaaaaaatgctaattaaaatcacactgagatactacttacctatcagattggcaaaaattcaaaactggataaaacattctcttggcaaggctgtagggagacaaaattgctggtggtagagcagaataaaagctctatagtggggaatctagccatatataacaaaattacaaatgcacttgtcatcctatcttgtaatttcaccattactaggcaagtaaaggctgggccctttgctgcatgatttatagcaaagtttggcaaatttcagccagtgggccaaatccagtttgctgcctggataaataaagcttattagaattcagccatgtccattcatttccatatggcctatggctgctctccctctatacagtagaattgagtagccttaaaaaagaccatagagcctgaaagcctaaaatctttactatctggccctgcacatacacatacacacacatacacacacacacacacacacacacacacacacacacacacacacacacacacgttcacctaccccttctttagagtgaattcctaatttctaaatcttctttctaagtctccccactgatagcgagactagctggagtcagcagtgccatctgggcagggtgccccaacttggaactgatcctgtatggtctccagttggcagaagctcctaccttacagttttgtaagttgccatccaaagcctgagactggccagtgggctggcagttggcccagtttctgtttttccccttgtttgaggtccaccagagaccagagactcatgcctatggggtagttccaggattctatggccagccctagttccagaaaggcattttgatgagttgattgctcttactgaccaaaatgacatgttgattttgtgtgactttcatgtcagacacaggggaagttgagagctctgggccactaactgtccatagttaacccttggactcaagccgtagctgtcttatatcagcattctggctgcagcgttgcctcccgtctagagcattaaagtatgacacggtggtagcagtcaccctttaccctgtgcatacttcatcacttgcacttagggaggtttcccaaccccctttgctggctctagaacacatgtcaggcagttctctagggatggctgtccctttctctcccaaaggtattcaagaccactgctccacagccggccctttcaattggtgtccttcttgcctaccgtcaatgtggtgatgtcgatgtggtaccatttcaatacaaataggttctgaagagccctggcattgcaaccagtaacaatattgttaacttttccttgcagtgggagatatgaaattagccaggaataacatatttgacaataaagaaaaaacacaaaaagatggtacctggacactatgaagaatcttcatctgtacttactggacagtagccaaatgtgtaagtacctcttttctatccattacactaaatcttcattgataaatcactaagcttcaaatgggttcaaggattttgcaacaacagtttaaagccaaatggcgtaagacggcagtggccctgcaaagaatatttgcctggagctccacacatcctaggagccgcctggcatccaactttttgaaatcgattctacagatattcgcagacatatatgtcatgacgtacttcaagattattatagctttgtttgtaatagtaaaagataagacaacaactcagggctcctagtggaataaattatggtgcatccatacaatggaacattatgcaactgagagacagaaggaataggaaatatctttacagatttatatggtaagatctccaggatacatagtaaggtgaaaaaagcaaggcatggaacagtgtataaaatatccttcctttttgtaaggttgtgagaaacaggatatttctctcattgggaaataaacatttgggcaagaaacactggaagaaaaatcaggaaactgagaaaaacggttacctatagaggacaaggcataataagctgaaagggaatagggatgaggacaagactggtcagtgtatactttatagatcattttcatttttgaatgatgtatgtgtatctcaaaaaatcatttagaacttttatttttaaagaaaatttatttttaaggaaaaatatattctttgccctattgacataccattgtagaaatcggtcctaaggtaataatcacaatatacattgcagcaattttcagctttacatttttcatttgaaaacagacttaagctgggactggtggcccatgcctgtaatcccaacactttgggaggccaagtgagaggatctcttgagtccaggcattcaagaccagcctgggcaacacagcgagaccccatccctaaaaaaaaaatttagccatgcatggtggcatgcacctgtagtccctgctacttgggaggctgaggcaggaagatcacttgagcctaggaatttgatgttataatgagatatgattgcaccactgcactccatccagcctgcgcaacagagcaagatcctgtctcaaaaaataaacaaacaaaacaggcataaacttcaaaaaaattggtactatatattatagtcagcaaatttatattttaaagctcatttgatgagttaggaaaatatttataaaataatgtgtgaaaaatactgagtacaaaactttatctggaatgacactaattttttaagacaccaaaatattttaaatgttttgctctggatgatgtgattatggattttttttctttttaaaactcttttgtgctgaacaaattttcaaaaatgaacctgttacttttatatttattttttgaattacttaataattattacttttctagacaatagatccccagctcaaatagtagttaactattgttttgggtcttaaaaaataaaaaaagattgatttttgtcctgtttagtaatgagtacctaatgttttaaaaaaatgaacatcctttttattcttacagatgagagaaaacattctgtagaaatggaacgttttagtacttaaagacactggggtattattagtaggaagaaatagtgaataaatatgggcctagaagaataacatttttctccctatcatctgttctttaggcaagtgataatgttatgctaacataggcttctgacttctggtaattcccacagacagccttctctggtccttctcccagatcacacaccaaattccgcgggtttggcacaaaaccattcatgtctggcttactacaaatccatgctgtccagctccacgaacttgcccagagggcagtttcagagcttctctcttcccactctttctcctccactgccctcagcaggtggttctgactccagggagaaggctgaggcctctggataagcttcctcagtaactccttgtccctgccttgacatgcccatattgtttcaagctcacccttcaacccatccatttctaccacatttcctctctttagcaccagtggcccacttctctgctccatcatatgcacaagacttccttggaagggaaagcctccatctgaccttaccaacaccattctactcttctcctctttaattgtcaactcttgcacaagaagagactcctgcctcttcttcctggccattgcctctctgcttagcacccgacagccatggcacaacttaactgcaagggaagctcagaaatgtggtcttcctgtgtgcccaggaagaggaagaagaaatgaaattgagtttaacacatagcatttgtctccactgcaggacttaagacattttattcggatattcaaggaagacatcacccaggaggctgaagggcttgaggctatttgagaaacagaagaaagagaaacccatgcagctaacagactcagtcactaagtcacaattccaactcctcctggcagaaaatctaatgactcatctttggctctggcttctgatctgctgtggccaagttaaggagcagatatcacatggtgattggactgcctcttccagtgccgtgagtcctctcacagagaggagtaagcggagaaagaatgattggcacctctagagtacgcaccaagccaatctgcagatcacagggaaggtgacctgaaggttattttatgaactgctcaagatagaacagaaacaactttgccttacactttacacattacttatccaggcactttcgggaaagtaaaagttgcaaagtaaagttatataacatagagtaaaatcctaaaaggtagtctacacacacacacaccacacacacacacacacagagaatgaatgcatggaaaatatgtggaaagtgtttcctcaatgaatgacttttaaactaatacctctcttctagattaagacatgaaatactcttaggttgaatcccttttcaccctcagatcaaaatgtcagtgtcaataggccaaaaccagagactagactcagctctagacgttttgtgggaataagaagtaatggattcacctgaatcttggtgaagtcacctgtattccatgagtaactctgggcccagggttgggcagatagtaaagtcccattttaggttcagcctgcttcagggcagtggtaaaac

SEQ ID NO: 3351 - DNA, 4717 bp, Homo sapiens
gtggaaatattttctacacaatgaagtcaacaacttaatttaaaccagtgtttgtgcggttctgattcatctgctgtggttcccgaagcttgagatctaaggagtacagggtcttttgtgatgacaatatgactaatagtaaaggaagatctattaccgataaaacaagtggtggtccaagtagtggaggaggttttgtagattggactttacgtttaaacacaattcaatccgacaagtttttaaatttactcttgagtatggttccagtgatttaccagaaaaaccaagaagacaggcacaaaaaagcaaacggcatttggcaagatggattatcaactgcagtacagacttttagtaatagatctgagcaacacatggagtatcacagtttctcagagcagtcttttcatgccaataatgggcacgcatcatcaagctgcagccaaaagtatgatgactatgccaattataattactgtgatggaagggagacttcagaaaccactgccatgttacaagatgaagatatatctagtgatggtgatgaagatgctattgtagaagtgaccccaaaattaccaaaggaatccagtggcatcatggcattgcaaatacttgtgccctttttgctagctggttttggaacagtttcagctggcatggtactggatatagtacaggtaaatattgggaagatggattcacccattgaaaagtggaacctaataattggcaacttggctttaaagcaggttcaggcaacagtagtgggttttctagcagctgtggcagcaattatattgggctggattccagaaggaaaatattaccttgatcattccatacttctgtgctctagcagtgtggcaactgccttcattgcatctcttctgcagggaataataatggttggggttatcgttggttcaaagaagactggtataaatcctgataatgttgctacacccattgctgctagttttggcgaccttataactcttgccatattggcttggataagtcagggcttatactcctgtcttgagacctattactacatttctccattagttggtgtatttttcttggctctaacccctatttggattataatagctgccaaacatccagccacaagaacagttctccactcaggctgggagcctgtcataacagctatggttataagtagcattgggggccttattctggacacaactgtatcagacccaaacttggttgggattgttgtttacacgccagttattaatggtattggtggtaatttggtggccattcaggctagcaggatttctacctacctccatttacatagcattccaggagaattgcctgatgaacccaaaggttgttactacccatttagaactttctttggtccaggagtaaataataagtctgctcaagttctactgcttttagtgattcctggacatttaattttcctctacactattcatttgatgaaaagtggtcatacttctttaactataatcttcatagtagtatttaccttgctgtggattgctgactggatggtccatcacttctggaggaaaggaaaggacccggatagtttctccatcccctacctaacagcattgggtgatctgctcgggacagctctgttagccttaagttttcattttctttggcttattggagatcgagatggagatgttggagactaataaattctacaaactgctctcaagttaccaaggaagaaaatacacgacaaccacttatggctctttttcaaaactcttaaatcagtagtttgacttttgccagggtaatcttcagttggccctgattcaattaaatggccttaatttttttttaaggaatttgtgtcaaaaccagaatgaagagtattcgtgctgcttttcatagaataaatgataatttgacatagacatagatataagttccagctctgaaattaattaggaaagaatataggatgtttacagtgaataattttaaaaccacaaacatagcagaaatgtactttattattaaatttgtaatgcaggattagaagaagcagagctctagtttagcctttcttgtctcacagatgtgctgtatcccaggcatactataaaacgaagagtgcccaaccaagctttgaatcgtattaacaatgcccacctctatgctagctgaggataaatttaccagttgctcatatttaaactgacctaaatatgttttgctgagcataagataaactcacttttacctccatctaaaattatcctgttctgatgccaattcaatttcagctctgcaagttcttgtcaggctaatctttaaacattgagtgatcttgagagattgttaatgaaagcagtgagtcattttttgatgattgatttgttggaaaaatgttgatgtgttttaaaaaatgtaatcttcaaaaacagaatataacctgagatgcatttgtagagacaagacggtacgagaatgtgtgtgtgtgtgtgtgtgagagagagagacttttgatgaagaactaaatcttggattgctgatagcaaagatcatagtgctgttggaatatcagcaatatagagttattcttaaacacattctattaacatgtttttgtcattgggtccaaaaattttgctgctgaccagaatttactatttgttacctatattctttttttttttttttttttttttttttgagacagagtcttgctctgtcgcccaggctggaatgcagtggtgtgatctcggctcactgctacctccacctcctggattcaagtgattctcctgcctcagcctcccgagtagctgggattacaggaatgcgccacaacgcccagctaatttgttacctacactctaattaataattaataatttcttattttaaaaagtagtactatttaatataatcaagataggagatttaaaatgagcaagtgattcatttgctcttttaaagaagcccgttgacttacgcttttaaaaaagaagttggtgggttacctcaattattgttcatgcttaaacatatccatttgtacaggcttatttctacgtgggacccaatcatatatactatatttctcaaataatttttctaaaactctggcctatattctaaacacttgaccaacaccttagttattgaataggtaaccatttttaaagtacatgtggttcattttttaaaattcaatctctcaagaccgttagatatttaataatttaagctgataagggtatcaaaatgcacattaactttgatcatcatgatttaagttgtaactttgtgttattatataaatattaggttgtttataaatatattgcagaaagtattcttgttaagctcttttaaatgaggggactgtggtttagagttatatatttttgcttatttttaaacttcaattattccattcttctgccttataataaaacttttaaggcagagaactgaactaattatagaatttctcctttggagagttataatgttacatagtgaacattcttataaaagaaagaataagtttaagttgatgaatatttagctgcaaagattttttacttaaaaaaatccatgaatatctttgattttattataaagcatttgtaaattatttgcatttgagctgtaagattcataaacatttacatttcccaatgatttctattttgatttttaaaaaatatacagggcaagctacatttttaaagcattaatcaacaactttattatattacacattccagtgcacaaacacacaatatcatttaatactcacagtagtacctgtgaaatatatcagatggatattcctatctctattttacagcagaggaaaccgaaattcagagaacttacatttctaaggttgtacagctgcaaaatgaccaaattgtgaagtccctaacatccaggttttcataatgccagtactctttctatgacatgtttatgaccctccaaatgtaccaaaactacctaactaattcactgagaggaagccaactgcaaaaataggatttttaaaagtacaatagagtattactacattttatggatttcagacaaagaaacctccgtttattatatcctgatggtgagtattgccagctctaaattattcatatttctaagaccaaggaaaatataggtaaatgaaaattttgaaataaagaacaatgccttaatttgtaaaatctatcattgctaccaccctgcccaggtctggccatttgccataaatgctggtaaataaatacaatgactgatagagttctgtctcctttctcttttgctacccaaccttggttagagcaaccaaatgtctaaaaggcatgtaacaggagaaaaaaataaaaacattagtcaccaattcgccgattataaaagggatgtagattcctttaaattattactgaccttttgaaagccttcacgtaagtatgcaacagataaaatgactcatttacccacaacaataatctattatcagtcttaagtaatgtgaattcactgtatttctttttatacaacataaaaacttctgctttccaaacttcttccttttcactaatttatcagccactttatttatacacagataacacttttagaaacatttttctttcttgtccatttttttctttcaaaaataaagtttcttagaacctgataa

SEQ ID NO: 3352 - protein, 526 aa, Homo sapiens
MTNSKGRSITDKTSGGPSSGGGFVDWTLRLNTIQSDKFLNLLLSMVPVIYQKNQEDRHKKANGIWQDGLSTAVQTFSNRSEQHMEYHSFSEQSFHANNGHASSSCSQKYDDYANYNYCDGRETSETTAMLQDEDISSDGDEDAIVEVTPKLPKESSGIMALQILVPFLLAGFGTVSAGMVLDIVQVNIGKMDSPIEKWNLIIGNLALKQVQATVVGFLAAVAAIILGWIPEGKYYLDHSILLCSSSVATAFIASLLQGIIMVGVIVGSKKTGINPDNVATPIAASFGDLITLAILAWISQGSCLETYYYISPLVGVFFLALTPIWIIIAAKHPATRTVLHSGWEPVITAMVISSIGGLILDTTVSDPNLVGIVVYTPVINGIGGNLVAIQASRISTYLHLHSIPGELPDEPKGCYYPFRTFFGPGVNNKSAQVLLLLVIPGHLIFLYTIHLMKSGHTSLTIIFIVVFTLLWIADWMVHHFWRKGKDPDSFSIPYLTALGDLLGTALLALSFHFLWLIGDRDGDVGD

SEQ ID NO: 3353 - DNA, 4852 bp, Homo sapiens
gtggaaatattttctacacaatgaagtcaacaacttaatttaaaccagtgtttgtgcggttctgattcatctgctgtggttcccgaagcttgagatctaaggagtacagggtcttttgtgatgacaatatgactaatagtaaaggaagatctattaccgataaaacaagtggtggtccaagtagtggaggaggttttgtagattggactttacgtttaaacacaattcaatccgacaagtttttaaatttactcttgagtatggttccagtgatttaccagaaaaaccaagaagacaggcacaaaaaagcaaacggcatttggcaagatggattatcaactgcagtacagacttttagtaatagatctgagcaacacatggagtatcacagtttctcagagcagtcttttcatgccaataatgggcacgcatcatcaagctgcagccaaaagtatgatgactatgccaattataattactgtgatggaagggagacttcagaaaccactgccatgttacaagatgaagatatatctagtgatggtgatgaagatgctattgtagaagtgaccccaaaattaccaaaggaatccagtggcatcatggcattgcaaatacttgtgccctttttgctagctggttttggaacagtttcagctggcatggtactggatatagtacagcactgggaggtgttcagaaaagttacagaagttttcattttagtccctgcacttcttggtctcaaagggaacttggaaatgacattggcatccagattatccactgcagtaaatattgggaagatggattcacccattgaaaagtggaacctaataattggcaacttggctttaaagcaggttcaggcaacagtagtgggttttctagcagctgtggcagcaattatattgggctggattccagaaggaaaatattaccttgatcattccatacttctgtgctctagcagtgtggcaactgccttcattgcatctcttctgcagggaataataatggttggggttatcgttggttcaaagaagactggtataaatcctgataatgttgctacacccattgctgctagttttggcgaccttataactcttgccatattggcttggataagtcagggcttatactcctgtcttgagacctattactacatttctccattagttggtgtatttttcttggctctaacccctatttggattataatagctgccaaacatccagccacaagaacagttctccactcaggctgggagcctgtcataacagctatggttataagtagcattgggggccttattctggacacaactgtatcagacccaaacttggttgggattgttgtttacacgccagttattaatggtattggtggtaatttggtggccattcaggctagcaggatttctacctacctccatttacatagcattccaggagaattgcctgatgaacccaaaggttgttactacccatttagaactttctttggtccaggagtaaataataagtctgctcaagttctactgcttttagtgattcctggacatttaattttcctctacactattcatttgatgaaaagtggtcatacttctttaactataatcttcatagtagtgtatttatttggcgctgtgttacaggtatttaccttgctgtggattgctgactggatggtccatcacttctggaggaaaggaaaggacccggatagtttctccatcccctacctaacagcattgggtgatctgctcgggacagctctgttagccttaagttttcattttctttggcttattggagatcgagatggagatgttggagactaataaattctacaaactgctctcaagttaccaaggaagaaaatacacgacaaccacttatggctctttttcaaaactcttaaatcagtagtttgacttttgccagggtaatcttcagttggccctgattcaattaaatggccttaatttttttttaaggaatttgtgtcaaaaccagaatgaagagtattcgtgctgcttttcatagaataaatgataatttgacatagacatagatataagttccagctctgaaattaattaggaaagaatataggatgtttacagtgaataattttaaaaccacaaacatagcagaaatgtactttattattaaatttgtaatgcaggattagaagaagcagagctctagtttagcctttcttgtctcacagatgtgctgtatcccaggcatactataaaacgaagagtgcccaaccaagctttgaatcgtattaacaatgcccacctctatgctagctgaggataaatttaccagttgctcatatttaaactgacctaaatatgttttgctgagcataagataaactcacttttacctccatctaaaattatcctgttctgatgccaattcaatttcagctctgcaagttcttgtcaggctaatctttaaacattgagtgatcttgagagattgttaatgaaagcagtgagtcattttttgatgattgatttgttggaaaaatgttgatgtgttttaaaaaatgtaatcttcaaaaacagaatataacctgagatgcatttgtagagacaagacggtacgagaatgtgtgtgtgtgtgtgtgtgagagagagagacttttgatgaagaactaaatcttggattgctgatagcaaagatcatagtgctgttggaatatcagcaatatagagttattcttaaacacattctattaacatgtttttgtcattgggtccaaaaattttgctgctgaccagaatttactatttgttacctatattctttttttttttttttttttttttttttgagacagagtcttgctctgtcgcccaggctggaatgcagtggtgtgatctcggctcactgctacctccacctcctggattcaagtgattctcctgcctcagcctcccgagtagctgggattacaggaatgcgccacaacgcccagctaatttgttacctacactctaattaataattaataatttcttattttaaaaagtagtactatttaatataatcaagataggagatttaaaatgagcaagtgattcatttgctcttttaaagaagcccgttgacttacgcttttaaaaaagaagttggtgggttacctcaattattgttcatgcttaaacatatccatttgtacaggcttatttctacgtgggacccaatcatatatactatatttctcaaataatttttctaaaactctggcctatattctaaacacttgaccaacaccttagttattgaataggtaaccatttttaaagtacatgtggttcattttttaaaattcaatctctcaagaccgttagatatttaataatttaagctgataagggtatcaaaatgcacattaactttgatcatcatgatttaagttgtaactttgtgttattatataaatattaggttgtttataaatatattgcagaaagtattcttgttaagctcttttaaatgaggggactgtggtttagagttatatatttttgcttatttttaaacttcaattattccattcttctgccttataataaaacttttaaggcagagaactgaactaattatagaatttctcctttggagagttataatgttacatagtgaacattcttataaaagaaagaataagtttaagttgatgaatatttagctgcaaagattttttacttaaaaaaatccatgaatatctttgattttattataaagcatttgtaaattatttgcatttgagctgtaagattcataaacatttacatttcccaatgatttctattttgatttttaaaaaatatacagggcaagctacatttttaaagcattaatcaacaactttattatattacacattccagtgcacaaacacacaatatcatttaatactcacagtagtacctgtgaaatatatcagatggatattcctatctctattttacagcagaggaaaccgaaattcagagaacttacatttctaaggttgtacagctgcaaaatgaccaaattgtgaagtccctaacatccaggttttcataatgccagtactctttctatgacatgtttatgaccctccaaatgtaccaaaactacctaactaattcactgagaggaagccaactgcaaaaataggatttttaaaagtacaatagagtattactacattttatggatttcagacaaagaaacctccgtttattatatcctgatggtgagtattgccagctctaaattattcatatttctaagaccaaggaaaatataggtaaatgaaaattttgaaataaagaacaatgccttaatttgtaaaatctatcattgctaccaccctgcccaggtctggccatttgccataaatgctggtaaataaatacaatgactgatagagttctgtctcctttctcttttgctacccaaccttggttagagcaaccaaatgtctaaaaggcatgtaacaggagaaaaaaataaaaacattagtcaccaattcgccgattataaaagggatgtagattcctttaaattattactgaccttttgaaagccttcacgtaagtatgcaacagataaaatgactcatttacccacaacaataatctattatcagtcttaagtaatgtgaattcactgtatttctttttatacaacataaaaacttctgctttccaaacttcttccttttcactaatttatcagccactttatttatacacagataacacttttagaaacatttttctttcttgtccatttttttctttcaaaaataaagtttcttagaacctgataa

SEQ ID NO: 3354 - protein, 571 aa, Homo sapiens
MTNSKGRSITDKTSGGPSSGGGFVDWTLRLNTIQSDKFLNLLLSMVPVIYQKNQEDRHKKANGIWQDGLSTAVQTFSNRSEQHMEYHSFSEQSFHANNGHASSSCSQKYDDYANYNYCDGRETSETTAMLQDEDISSDGDEDAIVEVTPKLPKESSGIMALQILVPFLLAGFGTVSAGMVLDIVQHWEVFRKVTEVFILVPALLGLKGNLEMTLASRLSTAVNIGKMDSPIEKWNLIIGNLALKQVQATVVGFLAAVAAIILGWIPEGKYYLDHSILLCSSSVATAFIASLLQGIIMVGVIVGSKKTGINPDNVATPIAASFGDLITLAILAWISQGSCLETYYYISPLVGVFFLALTPIWIIIAAKHPATRTVLHSGWEPVITAMVISSIGGLILDTTVSDPNLVGIVVYTPVINGIGGNLVAIQASRISTYLHLHSIPGELPDEPKGCYYPFRTFFGPGVNNKSAQVLLLLVIPGHLIFLYTIHLMKSGHTSLTIIFIVVYLFGAVLQVFTLLWIADWMVHHFWRKGKDPDSFSIPYLTALGDLLGTALLALSFHFLWLIGDRDGDVGD

SEQ ID NO: 3355 - DNA, 69716 bp, Mus musculus
ggccaagagaatggaatcgctggcctctgaggagacctacccttccagttgggctggtccaatcactttcactgagaagacctctaagagatgttaaagagatgggatgatgattagtcttttaatgagatagtttattctttcttgacagaatccagacctctcctggacctcagctgtgtagagctgtgaggctacctgcttttctgaattatttagaaacgtgtgactttacttctcttctattgtttttcttagtgttatttccttaagagagtttttcccctaacattttgagctttcttactcgctttctaaatccttcccatctaccacgtatctttttgtccaccagatctgatatccaagctggcttaaatggcatggttttccccctttctcctctgttctgaaccacagagctctggaggtttgttgttgttgttgttgttttttaagctaatgaaattcttcttgagcttctttttgagtccaggcttaagttctgttattgaactggctaagaacttcagaaggagattctaattttccctgtctcactgctaagatgtcattttcatttcagactaccatctcgaaggtctgtgagaaaatacatttctgtcctttaaaacacaagtccaagatttgtcatggcagcccagtggtaacctctgtcatttttgaagattgtttgaagacattgttttccattagttcattgtgtaatgggagacctgctcttatactaaaggctaacagaatagccccagacttcttgaataatttgtagattgaattccttttggaagaattccacgtgttgattcctgcgtctgccacaagagtgaagctacaaaattactttattgccacaaacaaacttctcaagttcttttataacaaaatgcacctccttttccaactcttgtttttggaataagagtttggaattatttgccgacattttgacagataccaaaatccattaaacaacataaaatgattcttcaagaattctcttttctctagctagtcataaattcctctaggatgttcctaatttagccttttgttttgtagtcagtgtagatttatatgcagttcttggaagcaatggacagatctcataagtcttctacccagttttgtcaaaaccccagcaggttcaggtccaggtgggtgaggaggcagacctgctgtcagacagttgaattggccacaccagccacaggggactgggaagagctgaagttcccttcctgttggtcctagatgcacacactaggtatcaccatcacagaacagtgctagttagatgtaaacattgtttacagaactaaagcagttctacagctagtattttttaacaagggcacaatgccctgatttccggttttccagtagctatttctctaggtgattttgttctatgcaatttgatcacatgtggagtcctgagtccatcgtaagagtgaacctacaggattactttattgccacaaacttctcaagtccttttacaaccacggccatctcctttccaactctctttctctttaaagatttatttatgtaattattttatgtatatgggtacactgtggctgtactgatggttgtgagccaccctgtgttgtgtggttgttgggaataagggttgatcactctggtcggccctgctcgctcaggcctaaagatttatttatttattattatatgtaagtacattgtagctgtcttcagacgaatcagaagagggtgtcagatctcattatggatggttgtgagccaccatgtagttgctggaaattgaactcaggactttcggaagagcaatcagtgctcttacccactgagccatctcaccagcaccccctttctaactcttattttgggggataacaaattgacaaatggtaaggaaattgcacttccagcgcaggagggggggttcatttctaagttccatttgggcaacaacagaagtgacagaattgcagcaatatataacaggcttctatttgccacggagagcagatcctgaaaatgagaaatattaaaacatcttagggtccatacactgttcaaaatagtcctgcactgagctgatgagctcaatagacacaggggtggagatgatgttgtgtgcttaacactattttgatgctggaaattcacaactagtgtttcagaattccttagggggagcagctgggcagctctaaaatgaaattacaccataaatgcttagtggaaaatgagaggctctggtacagttgtcaaagggcatctccctctaggagctatgaggggatttgggacaggagttaaggatgtgacagggcgaacctcttagatgctgttacaggcatggatagtaaatgtgtgacctccagtgtcctgcagagggcctgtgaatgagcatgtgaatgaacagcagtgggtgtgtcctggtgatggagaggtgacccttatgctgattgctggaggtaaggaaatgaggaagttcttaccaatcacatactgtgacgcagggcaaactgggtgaagggtactggagactatatggataaaaaaggaaagtgctagaatgaatctctggagtcctgaagacttagaaagaaaggtcatgcgaaagagtacaatggctggccaaacagataagcagttacctcagcatttgtatgcaaatccctctcctaggcatcatttgacaacatagagacttaagttgaattccatctcatatactgaaagctatattaaaaacagtgagagaattgttattgttctcatttacagttacaaaactgccacggatagactaagcaatttgcttcaagtcacttactaactattaatgggtagaactacgatgcaaactcttctacctccaaacgtagccctgttatctcacatctgtcaatattaccacaggatggggcagggcggtggcctggaggaatgggagaggagagggatttgagatgactttgaaatacatagagcctgatgaagcaagcaatctctttggatttggcttcatgaatagagatggaaaatttgactatcggatggaacgctaccaaacaccagatgctgtatttgagcaaaccttctctgggtaaataaattacgcattaaaatacaaactaagtctcaaagagacctcagcagttttaaagaaaatatctcaaaataaatatatagagaaaataacaaaggattcataattaagctttcatgttcaatcaggataccgtcagaatagctcagatgtggtacctggttggtctccacgtaaataaacctccacttcaccacaataagccactctaccatggctgccctgccatagaagaatgaaattcttttgaaattgtgggccaatatgcatcttttcttccattttattattttattttattatatttttttgcctgtcaggtattttggttacagtaacacaaagataattaacaggctctggcttacaacattgtggaagatgcaaatttggggagcatggatatgacttctcttgccatggagtggaaacaatgaagatgctgtaatcggcattaagctagaatttgtgaagcaatttaaaaagctaccagaaaaggataatgaggcgattcctgctccatatttatgtcataagtatacatcaaggaaagagatgctgcacacaaaataatgccagcatttgaaagtcaatccatccaggatttctatcgaattccttggggcaggctgtaattgacctgaggatgattagaaaaaggttctacaaacttaaaagagcgtccaatggaagcctggaccagaggagcccaacaatgtatcagaaagctctgttttgttttatctcttttgttacttgtgcatttcctggcccagttgtgaacacttgggattttggcccccacattgttgctaacctgtctgcaatggcctggtaggtaattttagaagagaacaatcttaaggggatactaacaattgggtggtattttgttacacatatttctgccagcttgccttgcaaagcaaacagcgcattgcaatgtaatgtaactagagaagttaatgtttaataaaaagagcacagtcagccggagacctattgtgctcaaagggtttccacactaccttcttcagaaaggaagtgttttttgtcttaggataacacgactttatccagtatttgttcagttgctttttctgtgaagctttttctagctgaatcttttttttttttttttaatggaatgtggactgacttgaggcttacttaattttatttactgagagttagaggaacgtcaaaggtgtagtcacattttttccatttgcttcatggctgttaaaattcttaaggtatatatcttaaaagtctgacaaataaaaaatatttttagatggatttatttttatgtggtttgcatatatgtatgtgtaccacgtgcatgccttgtactctcagaggttgaaagcaaagtcttggtccctgaatctagaattataggtggttgtgagctgcctcgtaggcactgggaattgaatccaggccctccacaatagcatcgagccttcctaaccatctctccagccccaggcaaatatacgttgtaaaataccttgtagaccccgaataatattatacatttaaaagtgcctatttttctgtgtattgcatttgtgtttgcctatatctcagagtgtgcacatatgtatatctgtgcgggagcagtgggcgtggaggaataaaaggaatgggagaaaacccgcgttcggccagagtttcggtgctctaggaaggcagatgcggaggactgcggcacactttctactcagcccctggtttggtgtctggctgtgcgaagctactggaccccagctcagcatggggcagtccaaggtctctcggcctcactgaggccagagataacaggttctcagtctcaggcatcccagacaccgctggacactgcggaagagctgagaacaaaatgccaccccccacggcttggtcagccccaggactgaagggcagggagagaggggtgctgggtggttctcactcaggtgagagtccttggtcggtccctggctggagcgcaggaaggccttcggtgggaggttagatgcagctctttagggcacggagggctttaatgagtagagacagactatggttttagagctctattgtagaaaggcagggagagagagagagagagagagagagagagagagagagagagagagagagagagagagagagagagagagagagagagagagagagagagaggtcggccatggccatgtggaaatgggggggggagagagaaggagggctagagaatagagtaagaaaggtgagagcttaaagagagagaggaggggccaagcagctcctttcatagtgggctgggctatcaggtaactgtggggaggagcatacctggctatagtcaggtaactgtgggggtggagtctagccagaatgccagaagcttgggacattgtgtgtattatagtcacagaattatggagttgggggctctatggtgtcaggcacttgtctctgggaacatggcccactgttccgtcccttgtagagtttgctactgggtctctactgggtcactggagcaagcctcattcaaccaaaacaggctgcctttcactatcccacatatctgcatctctttttctgtgtgtataatctgttccatggtttctgcatcttttttcattacacacttaacattatcatataatccttttataaggcattataaagccatgacattaaatgagaaaattccttagggggtaatattttacaaattacatttacagaattacaaaatatccttttggggggatctactaataaccttaataatttttgtaatattcatttgcaaataatttcaagagcagggaatttactctgtagtcactatttaaatacattttcagatgtaggtcaccattatacactgtaccacctaatttaatttataatgtggacacaaatgctgttttcacacactgaaagacaccctagaagtagaatgaaaatggtatcattgtatcatttaaataaccaaagttttatagtatttagaatttcttctatgttaataataatggtaatagattgaaaacttaagtatgctttttatgcaaagatatatatagtattggatatataccaaaatatagtgctgtgaaacattctaacttctttataattattgtgttcttatgaacaaggacaaagctagaaattctgaatgtaccttgttataaaaattctaaatcatagttctaaactacacttgtgttttatgttttacccagtatatatgcctacttttactctgtatttctcattaaatggtcatgtctctcctttttctgatgagttgagattctgacttcccaagaaagtcaagtttgagcttataattcaattatgtatatataaaattttagagtaattatactcctagcattggccagcttctactccttgtaaaacctttggttatatacattattgactactatcttaaaaactacctcagaaattaacaaaacaaatgtgtgttatgtcaggatgttgcggattgtttcacctgggcaggtctattggcatggtttggagtcactttggggattcattaagctgtgttagctctctgtcaatggatgcatttcctgaggttatcaacacaaagtaggcatgatctctttcagctctgcatgttgtaggtttgtggccatgttggttagattgatgctttttgtgcctgtggcaaggcaggacctcatagcaggagctggctagtagggttattttaacatataaaaatgtttacattgaattataaactcaaatactatgcaggaggctactcgtgtcacagtgacagagaagcaaaagagagagaggaagtggttgggtttccaatgacccttagtaacctaacttcctcacagggtcctttcttcttacagggcccaacatcctccagcaacaccacaggctggcaaccaagactttaacacatggtgttagggacactagcccaagccataaggggttggcatgcacagtgcagcacacctacacagtgccttgttgtgggttactgggtgatttggaggtacttatccccctccccctctcacatggtactctctcaccagttaatatcctggtctgagttactttccatggtgactggaatcattggtgtccatgtttatatatgatctgctcttctaaatacagaacaatgatttcaaatcgattattccagttaactaatatcctggggctttttaataatttttacctttaacatgatgggatggactcattataattacagattgtagttttatctcaaaccccacgtgcactgaataaaggataaatcttcttctttcctcctcctcctcctttgtatttttgagacagagtctctctttgtagtcctgggtgtcctacaccttactatgtaaaccaggctggccttgaattcacagaaatccacctctctctgcctctcaagtgctaggattaaaggtatgtgcccccaggcctgaacaatgaatatgctttttaagcaagcaaaagagagggactatgaagttactcatatggggtgcagcttgtctctgtgaggtcttagcactttgactctgggcatagcttccttctcctccttcccttcctcctctgtatttataggattacacgaataagcagatgtaacaatcttagacatgtgctgtcacatagtaagtatacaagcaacgttagctttagaatataagtgatcattgcctgtcattataagacacagtaatatcaggttggttagtacctcccaaagctgtaacgttccctacattctccttacctgtgaaatcttccaagagctttcactaatcctgagcacttcccctgtctacttaccctagacaaataaaacccaggaagttggcccaactcttccacaaaacaggctaactcacaaccattctaaacaagtgactcattgactgaaaacaaaagcaaaacaaaaccacaacccgtgtactgagtaggaaatatatatagtctacattataacacaaaacatatacatagacacagattcccacacaccgtgcggcacgtgttttaggaatggtttagctctagtctgttcaatgaatcaaagggaaacaatgttggttgtaactcatttattaattttattgttgaccaaaaaatggattctgagctttctcttattgtgtgttggaaattggaaatcaaactgactttcggaataagcattgcttattttatcagaataaaataattcaggttttatcagaaggtagcaaatatagtttccttcctagtctgttaagttaccgaggaaacgctcattcccaaacgggaatttattttcccactcgagagatttcatcaattcttttagtgggatacaggaactagaggggaggcgcatgtatattaactgttatggctttttaatactgtaaaatccaaatacccctctcccctatgggtttatatatttgaatgcttagctaccagttagtgaaactgtttaagaaggattaggaggtgtggccttggaggaggcgtgtcactaggggcgggctttgaggtttcaaaagcccaacaatgtctattctgtctgttgtctgtggatcatgatctgaagctttcagctactgcttaggtgccatgcctgttggcttcccaccttgatgaccatggactaatcctcagaaactgtaagaaagccctgaattaactttttttgtttgtttgtttgttttttgttttgacaagagttgccttggtcataatgtttcttcatagcaactaagtaacaaggcaaaggactagacaagtgtttgaaatttagctcagatgtttactgtctctttccctttcctggggcctaagcaacagaattcatagtttttattttatttatttatttaataattttgctatacattaactttctttaaaagatttatttatttattacatgtaagtacacattagctatcttcagacactccagaagagtgctccagatctcgttacagatggttgtgagccaacgtatggttgctgggatttgaactcaggaccttcggaagaacagtcagtgctcttaactgctgagccatctctccagcccccatagttctttttaggttgtgtgttttatgttttggagggaatgttgaaatttgatgacataattgttatgattaaaccctattacttcattaagtttaatttttgctaccataaattatcctgatttccaaaaaaagaagttagcagttgcaaattatacagatatggatttgaaactaaaaatattgtattcttagattgtgcatagtaaaatttgtgttaatttcccagttactcataaaatcttgataaaaggtaaacttcctaacagatgagaaaaacattcctcatactgctaataatttgaaagaagaaattgacatgcagcatgcaaacaatattcttccccttggatagattattcggggttgcagaattcgttctgaatcccctgtctagaggatttttatgatcagtttcctagcttgcaggagtcaagtgaagattccccatggtcctagtctgaatcagctctagactaggactggtcatttcaaattgcctcctgaagtacgttagggtcaggattgtgtgtgtgtgtgtgtgtgtgtgtgtgtgtgtgtgtgtgtgtgtgactgaagggcggaggcgctgacacattttccttcctccccgggtgcctctcaggtcctggctgcggacgcggcagctcccacgtggcaagttcacattgagtcgcagacgcgacccgggatcttggcggctgtggtccttcctccagggacctcagcgtcggctcggtcctccaccgccagggggcgtgcgcggctccgcggttgccgggctcattggccgcgtcgggaagcgtgggaggaggcctggggcgagctggcttcctcctcggcgcgggcgggcgcgcggcgaagccggaggagccggggaaagccgaggcgcgatcggcgcgctcgggaggaggcggcggcggtggcacctcccgtcggcctccgacaggactgacggcggcgcgaccgcagacgggtgaggctcgggctggcggctgggctgggcgcggctgggcgcgtggaggcaggagcggacggagcacctcgccggctgccggttgcctcctgcctcgcagcgcgatgcgggtcttggctgcagcggggcccggccgtccggagcatcgcggcccgctcagcggcgtctgccccgggcgttgggtcgcgagtgccaccgggctccggctgcacctggaagcgggtgtttgcccctcgtggtcggtatcctgcaggttgagcgttcccagagaactggatgggatggacgggcgtgctggattcgaactctgtgctggaccgcctagacccactcgtaaagtttgcatttctgcccaactggagctgctttctccttttgcaagtgaacacataggtgttctatgtctttgatgagtgctgttcattttatttttagttttattttctgctgcgttcacagatgtagtatgcatgatggtcagcgctcttatacttagtaatgagtcccagatggacgatttgagatcgacacatctagctgtaacttgcggggagtcatcagcttcaatttacatagttaattcctataatatagaactactatctgatagaacttttgcttcgtttcttcataggaagaaatacatgtatacaaagtccctaatttgcatctttaccgtcttagatagagttacccagtatttcctagcgcatatttagttttcacaactcctcacacgggtcctattattactgctcagattttacagattaggacacctatttcctgagaaagttttaaagttggatggtaatggcggatcccatggcctgagctttcctggaaggaccagtgatagacttaaaatttccaagtctttggaaacattgtttctcatacagtgccttagggagcacagagaaacctccattactgaagaagtaaagttaataacttcccagatgccactcactaagaaaagtaagttactctcccttgccctgctgtcttacatccctgctgtcttacatcctgtttctttctggaggttgctcatctgatgatttctctccggcagtttgctaggtttttagttttatgctagtgattaggtttgtttcatagaatcttaagacatgtactcattaaaacaaccagctgatgacttccagcacgttacggctcgacgcatcaaattcaagtcgttcatctgtcgttgctcattactcaggtataagagcatcatgcaaactacagctgtgaacacagcaggaaaaaaaaaaatagaaaaaaaatatttcttctttgtaggaagaaattgtaacataaaaagggcgagatagaattcctctagtcggtgacattctgcgaccctatggttgtggagacgcgaagctacagaatgatggaattatgtagaccagagaggcaggcacagactctcaatggcacatttctcccttttggtccctccctcggtaagactgttgagcgtcttgtgtgatagtttgattgctgcgtgagcatcctcagcagtgagtttctggtgattttcatcacggctcctccaggcttgttaaggcagttctgtgggatcagctgtgtaaactaatggcaccctgcattacctgcaattagtgggcttggagtgagttttgaagggcattgcataggatcaaaataggagcttgtaaaattgtcttagctgatacaacttctccctcagtgccttctttttattctgtgcccctggctgctgagctgcctgcctttctgtgtgggcagatagaagcaccctgttccagcactttccctcaggggagcttttggctgctgcaatctgtgaaccttgatatacttcagttctacacttgacctaggtatgaatgaagtgcagggaaacccggaaacatgagatcctgtgaatccatatcaagtggaatgtgaagtagttacaggaaatgaagatcccaccatgatgggtggaaatttattccctcctgctcttgttttctttcttaaaaataaaacaaaaccccaacacagtgaaagctgaaatactgatgttctattttgatcctcctatagtgaacacttattttttcatttttctcaaaggaaatttacttatttttaccttgcattcttttcatatgtaaggggtggggccaaggcccatgctgtggcgcatgtgtggcgatcagggaccatttgtaggagttggttttctttctggaactcgaagtcaggatgtcagacttgtcagcatacttaccttctgagccctttgtcattgtactcgataatatttgtctgtctgcccatctttcccgtagtaggatagggtaggattaaggtattgaaacagctgtagaattctaaaggagcaagcaaaactaaatgttatttttaaggtctctgcactgggttccagaaatccaatgaccattttagtttgtcaagtggctattggattttaaaacaaaatgctgctttgtggaagagaagatctgtaagaaaacatggggacagtttgagctagagtctgttttgagcatttcaaacaggagttctttcttcttttcttcatgtcagtctccagatttcctgcctgcctctccctcttccacctggcagacctggccctgggactgccggctctgtttccattcagaaaataatgaaaagtcctatcataggaattggactcggggatttgattcggtgttagatctgccttggctttcattttggtttttttcccccttcttaacgttttctgtgtgggttggcgccctgtaatcctgaagctctctttcagcctgagagaatcaccccaaagagcttgttagttcttatacctactctgggagtctggtcctgtaggtctgcagtagcagagacattgcttgttaaaaggcacacctccctggtgtgggtaacactttactgaggccttcgaagaacttgataggatgtattttactaacaacaacaaaaacaaaacaaaaataaaacaaaacaaccccccacccccaagccaaacatgtttggaagcctctgtatttagactgttaagtgtgtttcttaaaattgataatatacctttttaggtgtctaaggttttagggcttctcttgtagtgttattatgagggttaggatataatgtaaaggatattatattgaagtctgggagatcagtcagtatgcttgccaggggatctctggggctctctgcttggtcagtctaccctaatgagtagtctccagtttcaatgagagaccacctagggagtaaccaaaaagacacccgacaatgctgtctggtttcatacacacgcgcgcacgcgcacacacacactctcctatacaacatatgcacatacccacagacatgtacacacacaaacaccacactcacacacacacaaattctattaatatttcttcagatgttcaaccatgcaaactgtaagagtttatgaaaggtggccctgcctgacatctgtttgtagtgaagattgtattggtggctgagttctaaggagtgcctcagacatatcttgaggtgtcatgcaatctaatctggctactcatttccatttatttatccattagtggcttaatagtcttgttcactgaaatatttacttcatgcagtgtttgcgtaggtgtggcagttccatttgacctacagctttttattggtcctttttagtaagcagcccacatttactcccacttactgactctccacctaaacacaccacttaccctcctgggttgaatggtttttagatgtgatggtaataaggttaacagcaatctctcaaaagagacctgaactctggctgtgagttaaaaaatttaagagctagtgggaccctgatggagtgtctgcaggttagaatccatctttctgtactactgagaagtcagtggagactagcccagcctgtgtacaagcatcctttatagatggaaaaacttgcttatctgtactattaggctgaaggacgaacacaaggccattttctttttaatcccttaaatgttttgttggaaaacattgtcaagtgcatgcggatcaactggcacatttctgtaatgggctagctcaggttcctggagaggaaagaaagaactctaggtgtctctgtggtttctacagtttccagagttctgctaggaagcggccgactcaaaagtgagctgtctgttgcaacactgctctcagaatgtctgtcaggttccagcacctgttgttgcattaagtctttggggcaaagttggcctacgccgccgggcacttttcgtaacctgtgttaggtattagagctgcgtttgccagtgtaggagaagggagctttattcaggctgctgtagatcagataacaggtttctgaattcttcctggttgccagcaaggaagagcaatttcgaagtaaggtagaaggacttggaggacactaaagtctcaccagtggggttctgttttgcctcatctccttcctgaatttccttgggtaacagtctgggggaactaaggagcaccctggacttgagtgtttccacttacccacatttagatgttaatcctcttttaaatcaatttgcatcttgtgctgctgaaggcaaaagaagaaaagccctaagatgttgattcagataggaaaattcagagatggggcatggtagcacatgctagtattgccagcattctggagatgggaaactgaggtggcaggagctagctgtggaaattctgtatcagacaaaccaaccaaagcagccaggagtaggccatcagtatgcactcttcccaagatttttcagtagaacagtattctgaaagagttgttctactgactccttatttcaagttttcagtctgtggctttgtattctcccatttggaagaactctgtaccactttgtgggagtgagtttttgttgttgttgttattgtgcttaatttttttttcctccaatcaaaatacgagattagtttgtttctttaaaaacgaatttttttcctttttaataactttcatattccttttgtagggttttgtcttggtgttttggaagagtctcatgtagccccttctgtcattgaactccctgtctgggcaaggatgactttagactcctatgtcccttcctttttacctttttacctttttacctttgaagatttagaggtgtgtgcatcgtacttaatttttttttaactaactctctccctttccccctgtctgtctgtctgtctgtctgcctctgcctctctccttcccacattcgcttgctccctctcactttgtgtagattatattttttaaaaatctgcgtcttctactattcaataccaaagtgtgttgccaatattcaatcctttttcaagttagtatttctagtaagcatttagtgttaaggtcttgaaaatcacttgatgttaaagtccatctatcacattccacagtggcacaagggtagcagcttctgttgcagactgagttattgtttgttcttgctttgccgtgctagggagccaactccaggcttctgataaaccactgagctaaagccccgtccttgttctgctgtttcctgtttttgttttggacagggtttgacttagcgtaggctgggcccctactcattttctagtgaggataatcttgatcttctcatctgtcttagtcactgtctatagctgcgaagagacaccatgaccaagacaacccttatattataaagcatttagttgggggcttgcttacagtttcagaggtctggtctgctatcttcatggcagggagcgtaccggcatccctggcactggaacagtagccaagactacatcctgatgcatcggctgagaaagagtcagagcctagcaggcggccactctgctgacggtgctgatgagcccctgtccttgaactgggtttttaaatgttaatatctctttccaatggatacagtctttttacctgtctttttttgtttctaaagtttgtctggcttgtagaactccatctgcctttccatccagatacatgtacatcaagtgctttatcaattggtctgtctccccagcctaggaaatgtgtttaagagctagatgataatagttggccaagcatcagatacacagttaccagctccttcttaaagcgagtcacaacaatgatgccagcacccacataaagaagagcgctgttaccttgttcccacggccatgatcttatcagcagtgaagcagaacttagtaaccatttctgtctgtgtctttttgtctttagctgtgggtttggaaacagtccagactcactccggtctttgctgttagcaagcagctccagctataggaaggtaaaggtgtttccatttgaattaagttctttctgcttctcatgcaatacaggcttcctccatggaggacacacgctggcgaaatggctgattaagcacagaacttgtgcctttggtcaacactctttacatagaagccatctgtgttctccaaataacctagcaaaaatgttcaactactaaagtacctgctattagggaagttttttcagtcttctattttatttttatttttctaattaaacaaattactcctccttgaggctcagctaaccatacacgcaagcctgtgtagtctttaaggcagaatcatttttcagagtaggttgagaaataaaatttgaattcatgaaacatgaagatggtatgaaacccagagtttgttgtccatataaataaaaccttatgaaaacacagttgagccagacctgttgggaaacacttggaaggcagagctagtcagatctcttgaattccaggccagcctggtctacttagtgagtttcgagccagccagggctacgtaataagaccctatctcaacaagaacaacaacaaatccaaaagctgccatgtagttaccctccatctttgttccatctagctggggatgtacagctggagtagggactgtgggacctgatgtcaaagcactttttatacagaagttttctggacttttgctggcaggagtcacatgcatagagctgtatgatattgcaactttttttttcttttggaacattatctctttatttagcttgaacagttctagctgtcctggaactcactgtgtagaccaggctagccttcaactcacagcgatctgctttcccagtgttggacccactgtacctgctgtttgaatcttgtttccagtagtgcacttttgtatgtagatttagcagagtagcttaccccagtgactctttcagtaccaaccattttcctcttggacattaaatgctcagaggatgaaaatttactttaccttctagtcttgacagtgccttaaacagtccaagtttgcttgaaaaaaataaatgatgtataggtgatagatatgtatatatgcatatatatgtatatatttgtgtgtgtttgtgtgcatatgtatacagctagataaaggtactatgtaataagctgtatacatttctgtagccatttattacatatattgcaatttatttggggaaaaaaaatgggctcatacagttccagaggccgagagcttcaggctttgcagttggcatgttgccacttagcagacctgatggtactgtgtgcctgtgcagcttagcccttatgcagcctcaatgcaggcagagagcagagcctccctattagaaaagccagtgtttcctcctctactccaacaccgtaaatgcaaaagatgtgtcctccaaggcggatgggaattctcccaaccagaacagaggacctttgcggcagatcccaggtgggtgtcctctgatctatttggagacagtgtccatgggttaaagctctgtctctccactgcctctccctgtttagatgccaattacaagtcctggctgctttttttacatatggatctgctggacccggaccagctatgagctgggggccccacaaccacttcttgaggctcaagtaatttgagaggtttatacttaccgttcaccgcattcaggctattagaaatgacactggcgagcacatgcagaggttgtggtatgggaaggggaacagagttcccttgccctctctaggtgtaccattccccaggaactgtagcgttctctgtggaagccttccaggctctgggctctgtcctgtggcgttttgtgagacttcattccgtaggcatgactgcagcatgggcagctgtgttgaaatgtggttggacagaaaggaaatgaactaatgctagcggattgaatggggaaccccagcaatccatctggcctcttcagcaggcctctgggctgaggagaggcttgtgacctgtcagacagagctgcacggaaggttatttgtggctagcattaacacaggttaggttaggtttctatctcttgcaaggggaaagaaaaattagagtctagaataacagacaattaggtaattcttacatcctgccttgtgggaaggagtttagagccaggagctatggatggaaactcctactatgtctgaggaactacacttgggtgaacaacctacttggtgccccgctggaggaaggcacttcacctgcccagtctagattctgatgctaatcatccaggaaggtcctttcctgcacccccggaatggtgttgacttacaggcagcatctggccctatctgggtggccccagaatccaccttcctagactgggcttaagtatagtctatgggctattgttttgtagttttacctgtttttgtgtagtctcttgaaaagctccagctctctttgggctggaaaggtagctggggggcgttggggttgggggttcaggtgttaagagcacttgttcttgcagaggaattgggttcaaacccagtcactccagttccagggcatctgatacctagcctcttctgaactcggtgggccacaaaatggtcagacatacccatagaacattcatacacataaaataaaaattaaattaacaaaagaaaagctctagcccacttgactattagaatcatctgaatttaattggttcggttaagattgttctttggccaggactgaattaaagttggattaacgtgaatggtggcaattttgtgaaatataatccataatattttctttttgtctgaattcattttgtttttagcattatgctatggtatatatgtgtgtgcatatttttctttcatcatagttgtcttgaggtggtagtaaggatttctcacactcaaacttaagtcagtctgacaaactgtcaaatctctggagtggctagtgggatcagcaattcccagagcaatttgcaagagccaaattgattgacgtggtattttgtcaacaaggtcttgagtacatcagtgtgcatcgggagaaatggaacagggtttgtgagtgtccttcctctctgggacccccttgtaaggcctagggcagctagactagccaactggtggtggtggggggactgcctggccagacggtaattgtttttatggtaattgtttttatggcttgtttctttgatacagaaccatgctgtattgaaggagtgggaagtgcggttggacctgtgacctgttggtccttatcttaatgagttctagacaggtctttcttatataacagcccaattttgagttagaaaattgtattaaattggaccaatctagggagttgggctaaaagaattgtttaaatgaaaacatccagaaaattgggcctggttcccaggagtcttaccttgagaatctcttctttactctcagaccctgattgtgcacacactttggggcagtgtggccttccctgcttttattttcaggcgacctttgcacctctcagttagcattcttatctatctaaaaccaccaaaagcggttttggactatcccttcacttttggagccatgaattccttaagtatcctgtcttgaatattttaatatttacacttttgtttgtttgtttgtttgttttgagagacagtgtttctctgcatagtcttggctatcctggaactcgctttgtagaccaggctggcctcaaattcagagatctgcctgcctccacttctcaggcacgtgctgcagaatatttgcatttttatctatattctaagactactctcttcattactaatattctggttttggaaactagctcaaattcttgtatctctttcactgagtacacagctcatttatgttcctttgacttgtagcctggagactagccttctgaactattagccgaggccttcttattccctcaccattgtgtttattatctctgggcctatctcttcttgattgcctgaaggcttcttgagctgtttcacccaccacctcagattgttgtgtcttcaaatgctctttaaagagccaggcatggtttgaaattagcgcatcataaatgcttgccgtgctttgcccttaaatatatttcggtacttcgattcttcggatttacacttttgcatcattaaagatgcaaaaaaagttaattaaggaaattaattaaaatgtgtgaatgacgaggcattaattccctaaagattttttttttaagatttattttatgtatatgagtacactgtagctgtcttcaggcacaccagaagagggcgtcagacctcattacagattgtggtgagccaccatgtggttgctgggaattgaactcaggacctttggaagagcagtctgtgctcttaactgctgagccatctcttcagccctccctaagatatttgaagggaaaacaattgtattcacaaatgtagttgcttacagagttaggagtttagaaacagaattgatgggaagagcaagccggaggctggtggctaattatgcaggtgtggtctcccctggcagtggaagctgaaatagaacatcaggtgtctggtacccagatgtttaatctcttgttcaaagacattttcctaggctacccttagataggagcgaaattatttggcatatgagaggggaggaaaggccaagtgtgtgttgtgaatacagagttcagttttactggaaaccaaaagagggtttatggagttttcttttgaggggatgagttgtgtcaaccccccccctttgccccccatccctttatgtgaagttttgtgaattacttcagtatctcttgtttccttttagaattctggctggtgcctaaggactttaactagatagtattgactttggcgattatatagacattgttcacaaagataacaaagcagggaaatgccagtagtgaacagctcagttaaagtgttgatgtgttttgcttcagcttagcttttgcagaagaatgggagccagctgaagacatgggctgaggggcacgcaggcacgcaggcacgcaggcacgcaggctttcctctctattgctttctccagtgaataggaaaactgatattcttttccgtgcccttcaggcaaaggtcatttggaggaagagggactatctgtgaattattaaatcagtatgtgtgggtactagtgtgtgtacatgcctgtttgtgaacttgtgtgccacagtgtgtgcgcaagagatcagagaaataagaattctgttcctttacaaaatgttgactgaagtagttgtctggctgaatgtgggtgtggctttgtttatggttccggttccattttaggtaaacgttttcatgtattttgaatttggtaggaagcaaaagcacacacacacatggcttttctttattgtttttcctagcatatgttgccagttggtgaaataatatcaaagaatagtatctatctagagtttgctgtgaatgcttacaacagtgatatccaaattacattataaaaagtgacatacataatttgttaatcttaccagcaagagtaagaccactactacagttgtgagccaaatttgaagcttaaaaaaggcaaaacttgaagtccatcatatttcctattcggtccaatcagggacaagcatccatcctgacatatttccttccggtgtacctcccactcacctccagtcaaacagatagtgcaaacaaacttgtttacgggcacagaaacttgtggcttgttatttcccaagaaccgtagcccccatcattctaagtattgtctgtccttgggcaagtggggcttacaggttaactttggctcttatgtatcttgtaccggcatcgactggtctatctaaactccatgtctacagatggtttctgtcacttggtaaagagcttactgatctgatgtactagccagtgtttgaatgtaagtgttttgacttcctaatggatgtatgatcgctgagggtcatagtccctctgtagacacaggtgcgatgtatccaagggagcaaaggatagccagcagcagacacaagcaaggcaagttcctttgcctttttttaatggcccagggggagtggccagtgataagagggttttgtcttttttttttttttttttttttttttaattaaccattgctattcatagaatacttagaaatgacatggtatttacttaacttgtttcacataccctaagttaacctcaatctaaggaggaatatgcattgcataattcatggtgtttgccttcccttttgattttaggaccttcttttggagacgtgctagagagtgagaaggcaaaaatgagggtagcaggtaagagatttatttaatctggtgaaaataattttttatttcatgatctattttataccctgtttgctcaattaatggctaaaggagaggatgcatgattcattaattcttttgcatctttcatctttctcctttaacttccttccctggtgtgtgtgtgtgtgggggggggggggtggtggggggggtaggttcttgctttctaatccaatctggttttaagaaatcttctggcctcaggtcccatcatagctgtaattttggaaagttaagtgcctggctgaaataaactaaatcatatttagccttttcattttaagtagtcaacaagtcactacttgcacatttagtaggtataatatacatttttgtagatttggcatattgaaatcatgccaaatattaatacttatttttaatgagataagcgtatttccctactagtccatataaaatactcaaagaatagctttgaaaatttgagaatgactttttcttgctaagttaaaaaaaaaaaagaagaaaagaaaaggaattctaaaatagaactttctcctgtgtgaggttaagtataatatacaggaagaatttaatttactaaaatgtggttttgctttgtttgtttgtttttttgtttttgttttgttttgttttttgtcgagtgtgaagccagggcattaaagcaatatgaagtagtgtgttgtttacattgacagtcattggtagatgtccatagtattaatgtaggtattggtaagcatctttaaagggtagacccctaaattctcagttgacctttccctacctacaagggaaaacctgtttctcctatgctgcctccagccacagccccctatcaaagcaccttgctctgaggaattctgcacagctacaggagaaaacaggttgtttttccaacctcaagatagtcttatccttaattgtcattttcttacaagcaaacccagtattcgcctagagttgtttatcaaaggtgcccaaagttgaggcgggtggacaaacagcaatttttaatttcttagagttgtagagaatcaagcaggcagagttggtcaaataccatgattacttaaccaagttaactgaaggtcgctgcacatgattttgcacaactttgctgtgaagttacggagtatcaattctaagtagttatccacttgtggggtagggagactccagaaacaagagcttgtttgtgttctaaaaaacaatgccacactcttgctgtgtttgctccgcattttgtttctgtttgtttttaggttccttttaaataccctgttcaagtgtgatgtccagagccacttcttgttttgcacatagttctaaatgcactcagttaagctaacttcatcagctagttcttgtgtttgtactttttttggcctaggtctgggggcctttgataggctatcaggacagttagttaggagttcactgctgtgaactaattaatatcttctaagtgaaaattctttctggttgcgttgagatgctcatatagcctgagatgtaatgatctttggtttataaatgtggggacagactcaaagcagtgctatcagtggctggaaggaagacagaacgacacactgagtcaggaatgggagttatggttgtgatatcttaagcccaatctaaggccagcattgaatgttgggaccaaccctagagactattttgtagcatgctcctggagtctaccactgtagaaactgtgggtgtctctgcttacttttctatgtcttgaagcatctctttcttgttccagaccagtgtgagggaaccggtcctgccctactcagtgctggggctggagagatggctaggagcatttgatgctcttgctgcagaggaacaaggttccgttcccagcacccacacagtgactctgaaccgtctgtaactagttcagggaatctgacgccttcttctgacttccactggcaccaggaatacacattcacatgtgtacatgcaggcagaaacactgatgtgtaaagtaagatagggaaatcttaaaaatgaaaccacccccattaatgtgaccctgagcaagttcgtccttgaacagtgcaagtttcacccatctgctgaagagagacagtgagggcttctcctctgttataaatgcccgtgactgctagaaaataaggtacaagcctagcatgctctattcatagctagacgggaggggatgctagaaaactctctgtaccttcctcccagtttggttgtgaatctaaaactgctctaaaagaacacgtgacctagcatgtgctcaccttcacctagcatctgtcaactccacgcccgccttacttggcaaaaactgtgtgtgccgcctgccgtagtcattcgtctgccgtagtcattcgtctgccgtagtcattcgtctgccgtagtcattcgtctgttgagcatatatgtgttgagagcatgcttttgatgagaaggcaggccaaaccaaatggagttttgcttgctcatatatgaaactataggcagctagtaggtgctctaaaaggcaggaagcagactttggagggagaattgaggtggaggagagaaggattaagcaggtggtgaacctactcagtgcctcgttattcctgaattcatagattttttttaaggccttgggtttttttttttctaatttatttatttatttatttatttatttatttatttatttagagcagttttagattcacaaccaaattaggaggcaggtactgagattttttttctagtatcgcctcacgtagctatgaatagagcatctctaaatagtcctgaggaggctctggatgggtggcctttccaaacgtcttcggttccttcctgctcctcccctcctagaatacagaccattcttttgggtagtcttaggggatttcttcatctctgggatttttttttttctctttaaggttagataactgcagacttcatctacctctttcgcatcaatagaggttaaacctgaaagatcaatatgagcaaccgattgggattggttaagacacgaataaattgaaactgtttctgaataaacaggccctgtctctgaagtccagaggttgagagggaagccccaccctttttactttgcactttgtgatttgctccatcgtggttcctaggagtaagagatgattcatagtaagcagacgtggcaggggtggttattataaggtagtctgacgccctaaagatacaaagtcaaaagctaggagcaggcgctcctagagcttatcacacagccaatgactgtgatatccaagcctgtcctccaggccacaagtcctgtgttgacctaagtattaagcaagagggggaaggtagtgtttgcggtttctcgtggggttaggtagctctctggttggtgataggacagtaagcttgctacatgtcacgtccaactctttacttcctgtgtgtcctggccgtggtatctccagaaaggttttgtatcatccctggagagcattgctctttagggattggaagggattagtagtcctgtagacttggcagtgttctattcaccaggactcctgtagtaagccagctgctgctgatggtagataactccctatcccccacgcccctcgcgcaccgccccaaatccccctagacaggcgtctcaggtcttccatctgggagttgattgggaaaaaatcccttgacttggtgggtatcagtagagtcgttgtaaccccagtatcattaagatctaggggatgacaatatagaagtgtattcgccttcatgcttttgccagaatggagtatctgtgtagcagaagtgatgttcgttggcttataaaaccatgctgagttgcttctgccttttttccaggagctgcaaagttggtagtggccgtggcagtattcttactgaccttctatgttatttctcaagtatttgaaattaaaatggatgcaagtttaggaaatctatttggtaagtttcacacccttcagtactttattccttttattgtttgctattttattttagtacagactttatgctttttgtaaaaataaaagttctttgacaatttcatacatgtgtaaaatgtttggattgtgaatgcccgcattgcgttgttattcccttcctacgcctggtccccatccagtccacaccctcctagtttcatgtcctagttttttgcagcctcttctgtttagcgttgctcatgcgagcatgactttggcttgtttactggagcacgggcacctagcccatggctacaccactgaagacaatggttctccctcctacgatagcagtgatgatgttccagtgacttctcagggacgagtagggtagtatctcacagtttccgccccacccgtgactgaatgttgtatgtctggtcttctgtaggcaaacacggctgatgtgatttcctgagtgctgcagccatgctatgtctcggacacagcacttttcagcttcccacccctttaaattctctctgccttctcttctccaaggttgcctgagctttcagggaggacggtacaggtgtcctgtatagggttgggtctcaacagtcataatcttgtagcatgttgactagttatgagtttcttaagttagctgtcacctactgtagaacaacttcattctttaaaaacaatttattttattattttatgtgtgtgggcaagtttttttttttttttggcctgcatgcatgtctgtgcaccatatacatgcctggtgccataagaggccagaagacggcatcaaatcccctagaacttgagttagaggcagttgtgagctgatgtgtgggtgctgggaatagaacttgggtaatctggaattgcagttagttcttttaagtgctgacctaccttccagccccagaatcttattttttaaattacttaactaactaactactttatatcttgatcaactttctcttctctcagttctttccctccctcccccatccactcctccactttttcttttcaaaaaagaaggggagaccttccacagacatcaaacagcctttgcagatcaagtctcagtgagaccaggagcaacttcttctattgaggctagatgaggcagcccaatacggggaaagggtcccaaaggcagggtacagcccctgcttcagctgtcaggggtcccagatgaagactaagttacccaacaattacataggtgtagagggcctaggtcagtcctgtgcatgctcgttggttggctgttcagtccctgtgagcctctacaagctgaggttaattgattctgtaagttttcatgtggcatctgatccctctggctcctccatgccttcctccccctcttctgcaggattcctaagctctacctaatgtttggcagtggctctgcatctgtttctatcagctgctaggagaagcctctctgctgatggttctgctgggctcctgtctgaaagtctagcagagtatcattagcagtgtcggggtgtgctttctctcaaggctcaaggctcaaggctcaaggtggactagtcattggttggccattcggtcaatttcagctccgtctttaccccagcatatcttgtaggcaggacaaattgtaggggtagaaggctttatgcttgggttgatgtccagattcctccattagaaatcttacctggccgggcgtggtaacgcacacctttaatcccagcactcaggaggcagaggcaggcggatttctgagttcgaggccagcctggtctacaaagtgagttccaggacagccagggctatacagagaaaccctgtctcgaaaaaccaaaaaaaaaaaaaaaaaaaaaaaaaaatcttacctggttactgtagttggctggttaaggctccaaatcccccattgctaggagtcttagctagggtcaccctcatagattcctgagagtttccattgataggtttttagctcatcctagagatgccccacccccaccccgaattgtctctccctccatcctcctttacccaacttgatccctcctgttcccatccccacccctcacccacccccggtgtcttttctatttctcacactcaatggtattaatgcgttttactgtgtccaagtccatactccctcccccaccttgttgctgaacttctttgggtctgtgaattgtagcatgcttatcctttacgttatagctaatacccacttataagtgagtacatgctatgcatatctttctgggtctgggttaactctctcaggatgatcttttctagtgtcatccatttgcctgcaaatttcacaatgtcttgtttttaatagctgagtaatactccattgtgtaaatgcatcacatttttctttatccattcttcagttgagggacgtctgggttgtttgcagcttctggctattgtgaataaagctgctgtgaacgtagttgaacacatgtccttgtgggatggtggggcatccccgagtggtatagctgggtcttgaggtagaactattctcaattttctaagaaactgtcaaattgatttccacagtgactgtacaagtttgcacttccaccagcaatggaggaatattccctttgctccacatcctcgccagcgggtgaggccacttgagtttttgatctattaaccattctgaccaggctgtgatggaatttcaaagtcattttgagttgtattccctcatggctaaggatgttgacaatttctttaaggcttctcagtcattagagattcctgtcaagaattctctgtttagatttgtactccattttttatttggtttgttgataatctagcttcttgagttctttatatatttaggatatcagtcctctgtcaagtgtgaggttagtaaagatctgtttccattctgtaggttgtcattttgtcctatgatggtatcctttgtcttatagaagcttttcagcttctatataggtcccatatattaattgttgatcttagtacctaagctattgctgttctgttcaggaagttgtctgctgtgcccgtgcattccaggctattccccactttcccttctatcaggtttagcatatctggttttattatgttaaggactttgatccacttgaacttgagttttgtgcagggtagtaaatatgggtctgttttcattcttccacatgcacacatcccgcagcatttgctgaaggtgctttctctgttttgactgtatgattttggcttcttcctcaaaaatcaagtgtgcataggtgtgtggatttacttttaggtcttcagttagattccattgatgaacttgtctgtttttatgtcagtgctatctagattgtattattatttcttggaatgactgattgtaatcagggatggtgatagctccagaagttcttttattgtacagcattgtttttagccatcctggatgtttttgtttttccagatgaagttgagtatttttcttttagtgtttaaagaattgtcttggaattttgatggaggttgcattgaattggaagattttggaatatggctattttcactatgttaatcctacctatctatgagcatgggagggctttctatcttgtgatatcttcttcagtttctttcttcaaagacttgaattgaagttctggtcatataggtctttcacttgcttggttagagttaacagcaaagtcttttatattacttatggctattgtgaagggtgctgttttgctaatttctttcacaactgttgatcacttgtattgagtggggctactgatctttttgaattaatttcctatccagtcacttcactgagtgtttttatcagttgttggagtttcctcatagaatttttggggtcacttatgtatactgtcatatcatttgcaactagcaatactttgacttctttcttccttttccgatctgtattccctgatctcctttagctgtcttactgctctagctcacacttcagctactgtactgaagagacacggagagaatggacagcctcgtcttgtccctgtttgtagtggaattgcttcaagtttgtctccatttaatttgatgttggctaggtatgtgccttgtgtccctgttttattcttaccatgactgcccaaagtgtaagttcccagcatgggtttactaatgctttgtctgtctagaaaagaattattatctgggcgaatgtcattcagtccagtagtctaaaaaccaaaaactatctaagaataaaaacataaatgtctaagcaatcgatttttgtttttgtttgatattttaaacatatttaaagactattttctacatgatgagaaactttaatcatggctctggagtgttcactgtagaaaagacaacgctgctatgttgaaattctttcttcatttgagttaactgcttgaaaatgaacccaaatctagttggtataagggttagagaaatggatcgtaagggttggtccttaatattattctttcttttctccagtgattttcatttcttgcccacatatttagtgtttttatgttgcaaatgtacccatacgaggtcctttaactcagattacagtttcagtgctaagggtccatcccagggccttgcacatgctaggcaagttttctgctagtggtgtacatccttaactcaggagtttacaaatcctcaacaacatggaaaccaggtgtatttagtgctattttatacagttctatatattcttggttttcagattttcctattctagaagtgtactctggttttcctatggcactgcaggccgtttcagaatttactgtgtagccttgcccactgtacagttctctcttctgagtcattgcaagtccaatccagggctttgtatataccagacaagtgctgtgttacagacccacatccactcttaacacttaattcacttcctcttgcatctaaagattctgctacacaccagcacttagcctcttgtgtcaatactcttcagagcatcatggtatctgggatgtggcttccagttagaatgagcccatgtctagtactttaactagaacacttgtctcccctaatttccattctggtgtttcatattgctagggaccttcttatcgtgttgttttacctgtttgattttggcactgtatagagcaggcatttgctttactcttgtaactgtagtgccttttatctatattggatgtcagtctacattgaactggtgcaaatattaattgtggggtttgctttacttcttgtttagaatatattagcgctcataaccatttatttagcatccaacttaatttagcaaatgtcattgggttgaatctgtgttggttggtttctggaacctggtgtctagttacccatagtggtcactacagtttactcatcggtgagttccctttctgctgtcctttgtgataacttaatagcttgaacaggtcacctttttctttttattggaagtagagtattttctcgtacaatatacatcctgattacagtttcccctccctctactccttccacttccttctttccactcttcccatctggatccacccaccccatttctgtcttgcatttgaaaagaacaggcttctaaaaggtagcaaccaaacctgacaaaataaaatatagtaagataaaacaaaagtcatcatattgaagttgaacaagacaaatgaagaaaaggaaaagaacccaaactttatttgtttgttccttttcttgagacaggatttcctctatgtagcctgggctgtcctggaactcactctgtagaccaggctggccctgaactcagatctgcctccctctgcctcccaagtgctgggcttaaagacatgcactcactaaacctagctcgttgtctcaagctctttatatcatagtgtttcagaaaaataaaacagacatttccagacaggaagaatgaaaaatgtgcccacagttaataattgaaactaccaaggtagattgtgatgtaaaagaataaaataaaaattaaaaggcaaagaaccacaacaactaaaaactataatctcctaaatgaagtgttttggcatgggggtgtagctcagtggtaagtgaggactaccttgcttagcatatctagatttagtccccagcatgtcccactcccaaatacacaaacactagtttttttaaataagacttaatcttgaaggaattatcaagtcacgctccatttgtaaaaataatacgcagagaccctggatacccttgctttagaattccacccattcacaggctggacagggacttgtacagtctgttagtcatgttcctggccctgatttaatgcggggttagttttcagcatgggcctttaactagtacagagctgaacaaagtccaggttaccactgcagatattgctgcagtgaatttgtggatgtaattatttttagacttctatgtctaagccattggtaagtacaacatatatggggtagttaagacagtattaaaagcttaggtacaacttagttctaatcctatagtctgacttaattgaaggacattcatggaagtctgatgaaatcaggcagggtgtgtccatctcttgatgtattatctaaaagaaatgaaagatcggggttatcacctagagtcagaagtaaaccatgcaggtgaagagaggctcttgtcttccaggctgggcttgcacctgacactttagcaatcacccgtattcatgaaaattaggtcatctgctacctgcaggtttacattctcctaattgcagccctggggacaaatctttcggttttgatgggttttggatacaagtaaactaaccgtgtctagaagtgcttcttgagaatggctttcccttcaagcctctcatcagctaacacatgttccacggagggcgatttaccctgaagcccgatgactcacaaacagatttccaggccgttgtctttaactaagtagcaattacagatctggcatctgaaatgtaaccagcaaaatgatctgattgttttcaaatttttagacatttatttctactgtttcatgtatgtgggtgtttggcccacatgttacgtctttgcagtactcttatacatggtgcctgagggtgtggtgagcctccaggtgggtgctgggagtggaacccaggtcctttgcaacaaaagtgctcataaccacgaagccagctccccggtcctagagttactctgcccttccttctctgagactacttaaaaaaaaaaaagtcaccacatctcattttctggaagagttaactgtaaaggtccctaccctgccactgtgctctgggactgactggtgatctgtctgctcatagtcaccctttagaagtgagtggtgcagccagcctgagtgctatatgagatgattctgtttgggaccagcaggattgctcagcagggaaacaatgcttgtcgtcaagcctgacttcttgagttcaattcctaggacccacatggtagaaggagagaactggctcttgtaagttgtcctctgggatttccacgtgtgtcccttggcacgcccgtatccatacatatacaacatatgcatacacattacattgtatgcatacacctcaataagtaaatgtaatgagaaattaaacatacactaaaaaatagaagctagctccaccaatcacaattatgacctaaaacacacacgagttaactgctctgtcttccgtttccttatatctgaaacgcgatgaccatgtcagtaatcaccaagaagtacttgacagagctaacacataggaaagagtggaattatttagttctgttctgatcttcctctcccattccctattaccataatagatcagatgacctgccgtctaattagcccagcacgggtcagggagagtggaattcctgattttaacagtactcctttctagaaatttaaacacctgagtctggtgatatattcttttctttaactaattaattagttaattaataatgtttggtttgtgcttttttgagacaaggtttctctgtgtagctctggctatccagtctgtagacccggctggcctcaaactcaggtctacctgtctcttcctcctgagggctgagattaaaggcgtgtgccaccttcagccagctaattgctttttttgttaactgtgcttattagtgtggtgtgtgtgtgtaaacatatttgtatatgtgtgttggtacatgtgttcatggcgcatgagtggaggtcagaggaccacctgggagagtcaggtctctccttccagcgtctggatgctgggaacacccggcttggtgtcaagcctgccgctacccattgcaccttcacatcgtttttcttcttaaagacagactgaggttgagcgtgtctagcctgcacattgctgacttagttctgggggttagttttctcattcgaaagagcgaaagcatcggatctgatctctgtaattataccaggaaatggaaagagtgagctagggaaaccgcagcacctgcgtgtgtgcttgctccactccttttacccctccccctttctgcttgttatttgcttgttcgtggctgtctttccttgggaatcatttctgtgcctgggttatggagttggggaggctgttgtgctgtgtccagggcattactctttccctgcattccagctgtgtgactttagtggtgtataatattctcctaagtgttctgagagttgaagcctctgacttggtttcttctcttaaaatacctcgccactccctttcagctttaactttctgttctatcatttgaatagtagacttgcaggaaactcacagttatcaaaaatagtacagaagtaaaaacttaagtgtctatttatagtcagacagctggccagcttctttcactgtgtactaatttgccaaagcaggagccagctgcccacagtactttgatggtccctgtccacatttcttggactgggatcagacactggagtgttacagagcgccaagcgtaactgtgaaggaggacagttgagacccactgtgggggctaagagctgacctttgcccttccttgaactgatgaagtaaactcttagtaacagcattaatatcattatgccaaccagtacacttttgttctgagaaattcaggttccccaacttttacctctttggacttccaaagccttgcaaccctccccgccccccaagatgggtttatgaacgttctccagggctgtgtgggtacccagcactggccagcagcagcagccgtggcagcagaagcagcatcatttaaatattatcatgttcatcaacacacactgtagtcttttaaagatatattttcaggctgactttttgagtaggatccaaatttgcagtaaataatcaaatagaatgtttaaaatgacatttcactaataaaacacagcttctccaggatttcagcacacacttgcccataatgaattacatagtgggcaggtaactgcttctctgaagtgatattgtgatgtagatgcgcagtcattcacacacacattgcttaggcttattagaagctttaatatgttgaaagtaggtcattgccaatgggcctgtgctttctaatagtcttaactgtttctctccttagctcgatccgcgctggactcagccattcgttgtaagtctctcatcttggtgttttataagtactttatcctgtgtgttcattggaaagcttttatccaacgagtgtgggcaggttgtgaacaaaccctgaaggagacaagttgtgttggatgtcctactgtcataggctcttcattcccactgggcgtttgctcttcacttgggttctgacccatggcgtaagcacagacgatgtttatcgaatagaggagtctgctgccgctgatacctggatggatggaaggactgagctttcactgatcctggctttggactagacaatgcaaaggagccaattaaaaagcctcaggcaccctgaaatttaacttccagaatgattaagtaaaatctgccttgctgagcaagatcatatggcacgatccatttctgtcaggttagctcattcctcacgagggtctgaataagggagcctttttatattggaagctttgcctttcttcttgttcttttgatactcttagagaaaaacattctgacagattttgaaagtttttatttatttatagtttattaaagaatgtgtgtctcgcctttttaattaatttttaaagtatgtgtggtgtacagcctgcatggatgtatgctcaccacgtgtgttcctgatattcaacgatgctgggagggcatctgattctttggaactagagttatagatggttgattatgtggctgctgggagtttaacctgtgtcctctggaaaagcagccagtactcctaatcgctgaacccccacctctagcccctaactaggtataccttaatgtcttatatatgtgatttcgtgtatatagtttgagatctaaaattatctgaaatcttaattaatttgttttctaaagaatctcaaacgtatttctcttctccccaaagctacgaaacctccgaggtacaagtgtgggatctcaaaggcgtgcccagagaagcattttgcttttaagatggctagtggagcagccaatgtcgtgggacccaagatctgcctggaggacaatgtgtgagtatcggatggctcagagctcgaaggtcgtggattgagtgacagaccgtggactgtcatggcgttctgaaatgcttttgctaacagccagtaattctggttatcactgtatgattttttttctcccctgtgacaaagagacctgcatttatctgactttgtgtaggatgcaggtggctgtttcatttgattcttaagtatgagaaaaaaaattaactcatttaaaatcattaaaataaaaacatttctctagttggtatagttcaactgttcagtgtctccaccacacggctgttgaccacacatctcatacagaaaacatttgtgccagagcaaagtcccattgacagctctacccagagcaatgcatgccttacatcctaggccagatgcttgggtggcgctgcttgctgaggtgtgacatgacctggaggtcaagccccttgcgctcacacggctctgggatgagctgagtgactcccgagttgcagtgctctctacaccaatgctcgttggcttgtcatcatgccttgtcagctgtcacaagttcctgcctctgacattgcaaagcctgcttttagctgctcttcatccgatcgcccagaaaacttagggacctgacctcacttgacattagtgtaaaataatagatagatatgacatcaggctaggtaggctaaagatggcgtacagttaaacaggacagtgcggcatttttctcccagctctttatgaattttaggtagagcttttaaattaaaatttcagtgaactatgaaaggattggcctcatgcaaaacactttcttggaaaattgatgcttgtaagctctgctcattttccccgagtgctaatgggcagcaactgtcagttacactctgacttttcagtaccccagatctgtttaatgacacagcagagtgtgcaagttttggacgtttctgggtctttagacacactcccctttgtcgcactaaagagtccaagtttgaatctaaataagaggaggaaagttctcttggaatacctcgcccacagtcacctctttgaagcccagagtttagtgcaaggagaacattaaaccctttcccaaagccagttttccaaccgcagttacataggtcagaagataaatgtttattgacagtagggcttagtataagtgtaccgggctggcagccagatcttttggttctagcctggtgggcatgtcatgtagggtttgtactctgttgtagtttgcccaaccaaaaaattgaggctgcccactaatcagctgcatttcaagaatcattctgccattcccacgagagattaataattgatggaattttatagctagagctcaggtcatgaagggctttgtaattggccaaggatctctagtgcggagactgcagggaccagttcttagcctagtcctttttcttgtagaattatttctatattgaaaacttacaaggtttttaaacaatgctaacgtaaagaggctgcttgcctagacggccattcattcaccaggtgttgattgagtgtgttttcccctgtcgtggaatgtacagtctagcagtggtgacagatacctaaaaagtaattgcaactaagtggttgtcagccaggaccccagctgtgtaggcagtgagacccttacttgtgagagtgagtaaggtagagtctaatttgagatcgtcattgaggggaaagggcccaactttagatcaaccggtgagcatagattctaagacactgagtgtggtcggagaaacttgggatcaggagacaaccagagggaggacagacatttctgaacaccccagacgggaggcacatgttcacaggccataaggaaggaaagttctagaagtgagtgggtcaggccacacacaaatgaacctctgatgggtacaggtcaagggttgagataattttataagagtgttacattaaaaaaaaatgaattttatagctatataagatgagtcagctggtggaacaaagagcaatggaaagccacggttagtggagccagctgtttgacagggcatccctaatcataacaggtgttttttttttttttttttttttttgcctgtttctctacaaatacataatataatatgtatgtccctgcagctgttctgagtacaggaattcactgtagagacgagtactccagattgctgtctggacagaggtaatcactatgtttgttatttatcatagctatggaggtgcgaacgaactgcagaccctgcctgggctctgctcatttctagtgctcagggaagctgccccccaagatgcttaaagtagccatagctggtggcaggtatatgaggtaaaactgttcaaactatgatttgaaagtgtatagtgtttatgcctttcccttaagggtcattctttctttctttttgtttttttgttttttgttttgtttgtttgtttgttttaaggcatttattgtagaaaagcagagagagggagagagtagagaagtagaggtgtggaggggggaagggaatgcagagaggggagcaaggggcaagagagaagcaaggggcaagcaggttctctttctaaaggtgtgtgtagtggtccagagggcccttcacagtcatcaagaataaagtaaatgtattaattgctgtgactactcctaacgtgttggtttcttgggtggtttttccttgactgcaggttttccctgctttaatctgtttaacttgatagtgctgccccctcgtgggaagcctgcggcactgcgtcttgctgcctgccttcgttctgtgttggacttgtttgatggaatatagagcatgttctgagacgatggagacagtccatttgggaagttgctggggtttgattattagccaacacatcagttgtaaccagcaccttttggaaccatccagtgtccttctccagggtctggagcacgtgttttgaggagctccccttctgatgcagcccagccagttttccagtggtgaagcttatggccgtcctatgagtgtgctcagcacacatattcttttgtttaaaaagcttggagatgtagcttatatatgtccacactttactcattcgtagtgtgattcattatcgagtttgtcgtataattcatcgtgtacaaactctgtgtggtggtccggggaatgacactgttaggagggggtcactgatggagtaggtgtggtcttgttggaggaagtgtgtcactgttggggtgggctttaagagtttccttatcttcctggggatgtcagtcttctcctagtggccttcagatgaagatgtcgtatctcagctccttctccagcaccatgtctgcctggatgctgtcatgcttcctgccatgatgagaatggactgaacctcagaacctgtaagctagcttcaattaaatgctggccttataagagttgccttggtcatggtgtctcttcacagcagcaaaaccctaactaagacctctgccatagtcatgttaggcttattcttcctttttatcttgttcatttttcttccctcccgacctccctccagacctctctccttcctcccctccctccctcccttcagcctctgcctctagaatgctgggattgctgccccagcttagaacattttcataccaccaaaaggaaccgcacttgtaactctggcccttccccattttcattcattccgcaccttacacccgtgtcctaaataaccttgtttgcttctgtccctgtagataagcttggttttgatgttttccatagccgtgtcatcttcggtaactggcttcttcacttgctataatgctttcaaggttcatccaccttgtagctcgaactagttaattcttttcacagctgaatgtttttccattatagatatggctcatttgtatagccgtttatcaggttgataggcgtatgaattgtttccccgttctgactagtaagaaccgtgttcctgaaccattttctacgcaggttttctgtggctgtgtttccactctctgtgcttgtatggcagtgactttcagatagctgtcgggcttataaaggaactgtcagattgttttccaaagtgaccccatttgacctttgtaccagccgagtgtgaagtcctgggtcctccataagcccagacactacagcatctagtaggagtgaagttgtatctcatggaggccttgatgtgcatcgctctaattgttgataatgtcttgcatttgtaaaattcaccacagggaaatgtccattttgttcgctttgaaaattgatggatggttatttttccttgcttggttgtttgtgtgtgtccttctcacccctttatgttccgttacctgtatctttgtttcagatgaacttactgtcggcgtcattgctgttaaatagagtggttctgtaatagctgatggttcgcattccgtcttcatttggtgtgtttgaactactcacattcactgtacttgctatcactttagcattttttttttctgttttcagatagctttactttgagtttcatgatcattttttttaaagttctatttgaggggattagttgggaagaggaagtgaggtcagcaggtgtggctgggggaggcatgacatggcgacacgggatgagggagggttatgggctatatgatttaaaaaaatactttctaaacacacgcagaattgtttaaattagtgaaacccatggatattgtatatgataataaaaacattttaagaagtttctttagatttactcactgtttttgagtgtatcttttttggagagacttatagtgatactgtctgtcccttagcaggaaggttttggaattaaggtctagtgtttcttcggtaaatgacacctagatgtatatcacggcactatgcctgcatgtttgcagtttgcaactagcagaaagaggaaggcactggctggcacggagcccttctcagcatcagatgcacgaagcttaacattagttttctttttccatactttgtcgtactcatttacataaacgaacatgccactcacgtattagaattaattccctgcaactgtagttcagttccagatatgagttctgtggaaggcactgacaccttctgtggaaaccagttgactatatggaatgcataataaagcattagagacttcatttgcaaaattatgtgctacacattctatctaatattcacatacgtgagtgtatgcatgctcacatgcctgcacagcgcctcctcttgcaatacactgctgaggaaatcgctaatacctggaattcttttaacatgacctacaaactttggttttgtattccataaaataaactgttagcaagccaatatgccactgtgccgtgcgtctcacggggtcacctgccattgttgacagcccgtaagctgcagagcattacgctggttatctcaggcagcccacgtgtagccgtggcgaggtataattcgtaggtacagcattccttctgagtgcagagaaggtttgcgttgataatgactaggaaaatgttcacggtggggtggcctgggtacaacagtgcttcactactccttgctttggcttttaaagagcttgtatagcataggactccatttcatgtcaccgtgtcacagtcacagtgagcctacagaaggtacacaagaaagggtctgtcctttggcgttttgagaatggttgagagatcgtgtcctgtggcgggcttgaagaatgcctcagatggcactgcacggtattacacagagcggcaacagtgtggcatttcaatcataattattttaaaattactttgttttcctttgtgtgtgtctgggtgtgtgcacaaaagcacaggtgtcagcagaggccagaggcctacaatccccctggaggtggagttactggaggttgtgggcctcctgactgtataagtcatacatgtttgcaaccactgaaccaactctggcaccattgtacctttatgcgtagttttaattttatgaagtattaattgagttgacactacagtcgactcagcaggctgtctttgatgttaaatgtttgtttgttttttttttttgtccatttgtcgagttgagtatgcggtatgtgtataataatacctttttgcgttttatttctctgacatgtttacatatgctgtctgaccctaatgtttgttttgtcttctctccctttagtttgatgagtggtgtgaagaataatgtcggaagaggaatcaatattgccttggtaaatggtaagaataattattgtactttgtcagtataatgaagggatatatatatatatatatcccacactaaaatttatccttgggatcagaataataggcaccactcaaccctgaaacctcaccgacaagggtgccctcttgtgcaaaccattgcagatagacacttggaatctactgatcggtagcgtgcctttttgggcacgttgcagcggtttgcattgtgagcaagcttcttatgaaatcgcaaactactaatctagtactaaattggtgccacgtggctgtgcctttcagaacgcttatttagtatgaaaatcataagggcttgtaaaatgacaaaggatggtggattgaataagtatcgggagcaataaaggcgtaatgatttgtaagttttcatcctgtccgtgttctcctcagaggttcattggtgtagacaggtccgctgaatcctgaacatagcgaatgttaccaacagcagttcatccaacccaccgcagagaaaagctgtttgctttattcataaaggcaactataggactttgtactaagctaacaccttaatgtctcttcatccgtttcattgatcttaaatgtaaaataagtgtaaattttgttttaaaataactttaatatagattgttggttttggtagctaacttctttgctgtagatcgagcttgtatgttggaggtgattagcacaggatgatggccccacatgaaactgaagtgtagcatagaattgatctgaaaccaatgatacacatctacgtgtatagttcagattataatttctatgagcagttccttctgtcagtgagttcatgccatttgttgggtaacactactttttaaaatttctacacttatatttgagttgtgtgctttaatatgtgttctgtctctttcagggaaaacaggggaagtaatagacaccaaattttttgacatgtggggaggaggtacgtgtgcagcttacactgtgttcctgcggctcacactgagccatctgagagagaactgtttgcatttccctccctcgggcctcactgtgtgtctactcatatttaatacattgcatgcagattggttattgcaggaacgttgtatgtgaatgagatttggaggacatcagcccttgttggacaggacacctgactcaaagctctgagtttgtttagattgctccctgaagttagacatatcggaagaccagtataaccagttcacacagtttggcttgtgtatggtttttgaatctcaaaaattagtcaaaagtgggagccttcagtagataaggtaaactcaggttctagaaaagcaatgctcccattaattcatcctattaactattatttatacacaacacacacacagacacacacacacacacacacatacatattcaggttctagaaaagcaatactcccattaattcatcctgttaactattatttatacacatacacacacacacacgcgcgcacacacacacacactcacacacacacacacacacacacatataactggactctgcgattacatagtaaatatttgagagagggcatgaacttttctttgcagtttacaggactcagaacaaaccacagatatttactccttcagtgtttgggagtcctagggacagagcaaggtcactgtcatgcatagcaagcactgactccccaaagcatgttaccacaaagggaaggatttctttagaaaatgcattatttttattattgtagttatgtgtaggtgtgcgtctgcatgtagatatatacgtataaggatgcaggtacatgaggaggctcttacagcatgagttacaggcgttgtgagctgcctgatgtaggagctgaggaccaaattcaagtcctctggaagagcagcgagcactcctaagctttgagccatcattcaagcccacagggctcctttatctttaaggaaggcgggcttaccttttggttccctggccccataagccggtagctctcaggctgtcgctgttgatgctcagtttcaaggccagctgatgtgtctgatatttcttcagctcttaataagctgctgtgtgttatttatttaagctttagagaatgtttcatagctgtcagagctatattaaattacactgttcccatcagttttaagttctgagggcatagttgctcttagtataatttataacacagaaactcttccgtgaagctgttgaaaccaggcatgtaaacagagatccggtactgctctctcagcccatcactgaagcccatttgctgccaaaaactcttcctggttcagaaataatagcagtttagtgtcatcttttcatgtcaatgggaatgactcgttggcatttatgtttctgcattaaaaatgctcttattataaaatgcaatcaattagagaaaaatgtttggaatccttgctgttggaaaagagagagagagagagaaggcttgaagtaatagagctctggagtccttttagacttgtggcctataaggaaagctaacactgcaaagagctcacaagagaaaatgctttagtacctgaccagtctgtctggcaacaccagtttgccctcaccaagctggattactgtgaagttcctgtggccttgatacataagagaccaacgttggccataattagtggggcttttagttactgtctacattccttccctcagtttgttacagaatggtagacctagaaacttttaaaatatgcctttttccatattacaaaaaagttttacagatgtctctgagtaagcagggcttacttttcctagacaagcacctatgttaacatgaccccctgtggtccccaaaacctcacatggacctcagagtcaggcttcctatggacggtggaccctgttacacttctgagaggcctctgagggcctcactatacgaatgatgctcttacatgcattcaccgtggatttttagtggcccctgttttatgaatgggaaaaacgcaagatgattcagggctggaaaataaacctcacagcaaagaggcttaaggaattatttggtagtggattattttgtttagtgtttttttttttccttgaaaattttgaatttttaggcctttcctaagattcttacttgacatcacttttcattagaaacaattagtcattttatggatacttcatataacgctaattcttagagattattgtgatagtaattccattatttacaaataaaatccccaaccactctccattctttttcttcagatgtggcaccattcattgagtttttgaagaccatacaagacggaacagtagtgctaatggctacatacgatgatggagcaaccaagtacgtaaactcagagcctaacacaacttttggactcataattcatactttaaaaagcaatatattttcactgaaaaacaaatctattaagtagataaggtaattgtagaaagtactatcagctctcaaaagtctgttgtcctgtctttacataaagtccatcgttcatatgttacgatgaactttgaatcccattgcacatacgtattttatacattcttttgtgttatagcaggattagatggttttctctaacattctccttttggtttttggattgacattcttcagtagcatttttagggctcagagaagttcgtcctctgggcccacatttgttaaagctcctccttacctgccaagtttttcttctaattcataacatggtgataactttcttttgcatattttttttcctcttttggacctttgtttataacataagggttaatttctgaaaatggaattaacggtcaagggtgcagatgtgaggagtgtgtgtgtgtgtgtgtgtgtgtgtgtgtgtgtgtgtgtgtgtgcatgcgcacacgcgtgtgcacacttgtgtgcttttacacctgtacatgtgagtgctggtgtctgtgagggttctgaagctggagtcacaggtaatcgtgagtcacctgacatgcaggaatgctgtgaatctaggttgggtcccttgtaaaaagagttaactgtcttacccactgagccgtcatcttctgcagcccaggaaatgatatatttcttacagagtttagcagctgatgacggttttgtagcttgttttcttgtattgtgcgtcctgggaaatttggaaagcgtagaaaagcacaaagaggaaacaagttcccacatcccatcgcccagggaaagcgagtgtaaacactgtagtttcttgatgacttaatgcacattttcctcattttggtatatattttcccatgttaagtattccttttggttgttcatatgcgttttaaaatgtacgttatgattttataatcttaaaagctcaataacctgtttttccttaaaaattgagattattgagttaaagaatgtgtgcatctttttagagtttcaaattctagatggattttttgtttttgtttttttttaatgacttatttcattatttgtgagactagacttatgtgtgtgctcactagatagatttttttctttttgtttttgcattttcttttataaaatatgaccatttaagctgacccatattaattagtaaaagttctttatatattaaggtattaaccagttctcttgttaaaaatacaatttttgtagacaatcagcttttaattttgtcaacttaaggtgcctttgacagagtaggagcttgtacctagtggtgcctgtaggcttttccttttagtttctctgactcttaaactgaagaagtatgtttccattcccaaattagataatttagtatattctgtcttgcagagattttattcttttcctgtattttcaaaacccatttgtaatttccagagctttacagagctctgtgtgttctaagatggtgtaggctcgtttctggttctcttcagttagcctctttctttctgtttgtctcaaagacaccgtttcagctgctttatgactgttttgtaaaaatgaatgtgctttattcctctctgatataatcttttaaaacactctatggacaacactgacattgtatatttttaaactggttcaactgatgattaatgttaaatctatgaagtgaggcttgatgcaaccggcaggttcagctgactttacacagtaaagcctcattaagccttcttcattagaaaaagtgacttgtgtgttggtttggctagagtctagactattatgtgtatagtgtcatttttttttttagcataaaggctcccttttttgtctagacacacacagtcttccttttttcatgcttttattattaagcctaatgagaatcagagctctgatgagatactgatgtagtcttgagatggttgcattgtgggtgtcctgaagtcctccagaagcagttagccagcctgagcaagtcctatcagccctggtcctccccacctgctggaggccagcactcatgtccctaagaagctgtggagactgtaaagagatgctgtcttctcagggtgggctctatattctgttcagcattccttattttggataagtagaacggcaagacaatagacgtgttcccttgcgacccaataccgaagcatttgaaactaattgatgtttccttttaggtttctaagctcagtacacatagctcttttaacctcttatcatattgtgtttctccttcatttcctttcctggctgtgtttcctgggcatcctttggttcattattgtctctcttcaaatgagtgtctcaaattaagcacagtgttccagatgtggtctggccagaactggctataacggagacgctaacttgccctgtttcaggagattacatttctttgcatattcatgcagactagaattatattagttttctctaagcaatcaaatcacatttttggctcatgaatttttggtcaagttagattgttaagtcgtcagatcttttcctttgatgtcagatttttccctccattcagaacttgattttgttttatgtaaatgaagaactttatattcatttattcctgttcaatttgattgtactgattgggcctgcttggtcttgggtctgacgtgtatcctaagagggttccacgatccaggctttgtactggctccaaagtcattcgtgtgtctaaatttaagcccttgataaaaatgtttaccaagggcagtatgccgccaaactagagacctggttcctcacagaattcttcggttaatccatttcagggatgactttgcagaccgctgctagtgtcccccagtaggcgtgctgtcccgctgcaccttagttattttactctcagcagctattttctggggctatcagatgctaacttgaaattcatagaggaaactcatttcagtaccctgatctgctgccatgtagctcaagtttcagagatgtcatttaacttggcttgactcatgcctgcgcccttccagctgctcccccttgcttgtctcccttcattgttattcttacaggggctgttgtggtcttccagtctagatttttgttaggaactggaatttgttctattggaagcagagttataggtgaacactgtcacgtctggcttttaagtgtgctgttagaatcaaactcgagtcctcttgtttgcccagcaagcatgctactactgagccttcctctccttggccctgtttgccttaaaaccaaagcaaaacctaggtaatcaattggtgtacccttccctagggaagactttctcagcatttcctagttacctgtagtggttggtcatggtggaggcctcctgacagccccctccccgccacgttagcatgctcattggtatgacccttgtttaggacatgtttaggcatgcttggagagactttctgcctgcagctactgacatttctggagataaagaaaaagatctcatggcaaacttctttttcctctggcacttgtaatctttctgccttatcttctgcaataaacctgagccatagacgccatgttatatttatttaggaacacatacatacacacacacacacacacacacacacacaaacacacacaccaccaccagcagcaacaattaaagaataacaaaagttattttttaaaaataaaatacattatctatagaaaaagaaacccctagagtactaaacttgtaagagcttagcatatccatttttagtttctaaaacaattgactcttccttaagagtgtatcagtggtttgtaacaattggctacaacaatggttataacaatgtaacaagttgtgtttgggatgcgtctgtatccagaagctgtaacaaattgcgtttggggtgtgtctatatccagaagcttacattgactttaaattacataccaggactttgttgagttactgcttcctttctgtgcttgcctcctcggaggatgccttgatcacacttgatcctggtactcattttgtaaatcagggttccttcattatactttattactctttctgtctttatagcagaaattctttagtggttttgagttctgtttcattctgacatggaaggttttcatataatattgctaaaagctttgtcctcagtaatgtggtttgccttatacttcaaaagctttcctgttttcagttaagtaccttgctatgacagcagtaatttagaaaccaatcctctccctgattattatagagtgaaaattattagttttagttgtttgcttgcttgtttttccatttatttgtttatttattttatttgtttgtttgtgggggtgtggtggtatatgtcacatgtgtggaggtcagaagtcagcttttaggacctgttctccaccaccatgtgtacccagggatcaaagccaagtcactaagtttgctggcaagtgtcttgaccaactgagccatctcctaggcccacatttgcttgcttttaaagaactacagtctcagaagaatttctggggagcaactgtcttttatctctggttttgatgctcccctctccccatcttctattttttggccttcagactctacaggaatgtgactgttttcttccataattcctgatatttatatttcttagtttattcttccctacgaatcagaattgattccagaaaatgagctctctcttttcttttcgtgttttggaggcatgatttagctggatggtgtaggcctgctggatgtacctcctctcccagtcagagtgggtcctgatgcagactctcatctctggtctgggctctcagtgttcaggatcccagtgtagctttgagccttactcagggtgagtttcttgcccccctggccccgctcactctgccccagcttgctctggccatatttatttcatatatgtgggtacactgtcactgtctttagacgtatcaggagacgacatcagatgcccattacagatggttgtgagccaccatgtggttgctgggaattgaattcaggacctctggaagagcagtcagtgctcttaactgctgtgccatctctctaatccaaggaacacacacacacacacacacacacacacacacacacacacacacacacacacagacaaaatgcattttaggttaacatacttcagttaataagaacaatcatccagaaggggggctacagaaaccagaaagcaaggtttatacatttagaggctttctcagaactatgggctttgacaaattaggtttctgttttatttttggcaagtagcactgtctgtgtgctgagtgttgcaacttggatggtgcttccattatggagtcagttgagcctattcagatctggggccctgctacatcagttcccattccaagtagaccctatgggtgatcaaaggagaccctgtggatgctccaaggagaccctatgcaacattaggatgtctttaggcccccttgctttgtttgcttcagtcctgctgtagcattggaaagttttctatttatcttaaaagaagtcttctctaaaataattgattcaggataaacctttgaaaatggattatactttagttatggtggatgtgtgaataagcacacacattctatggtgtgcatatggaggtcagagaacagcttgctagagttggtttctttacttccaccatgtctgttctggggaccgaactcagatcttcatgttggtgtcaagagcttttatcttcttgagaaatcctgctgacccccaaaataaaattttaaaagtgtgtgtgtgtgtgtgtgtgtgtgtgtgtgtgtgtttgtgtgtattacacaggttgtataggtgtgtgtgctcctgagggcatcaggtgtctttgccttgttctctgcttattccctgcttattgccgtgcgtctggaactcatcgttctctgctgggctaccaagcagcaagcttcagcagaatcttgcagcctctgctctcccgatcaccagggatacagatgtctgtggcctcactggcttttctgacacctgtatatattagtgttctcactcgggctgttttgcattgatttaaacttcctcctgaaataggaaattaccctttgcttaaaatagaatagaacacaaaaggaacatggaaacagctcacagactttacataggaagatcagaaagcattacaagtcactgggaagtgattcttagagttggacatagacacgggtactagggttttgaggctcatggccatttgtttcaggaaaagcgagaccacagttaccagcaagggtgtgaatccaggatgaaaggttggagggaaccagggccaggtttcctatagtccttttagatttaatttttaaaatctctatgtgcgtgcatgcctggatttgtgtggtgtctgcacagaagtacctgccttcatgtggagattagagcagtattttgggtctttttgtactgttttctgacttgctgccttgagacagggtttcctactgcgctgaaagttaactagttgagctaggttggctgcctgatgagctcttggcatcagtctgtctgccatcttagtgctggttttacagggacatgcatgccctttcaggagggaggcgtgctggtatcacagggccatgcagccgtgcatgccctttcaggagggaggcatgctggtattacagggccatgcagccgtgcatgccctttcaggaggttgctggggatttcaaatgaggtcctgtgctggcagagcaggttcagagagagacccactcagccatctctccacaccataagaatctctcccagcagggtcacactaggcatgctcaaatgatccagccgtaaatgaagacaacccatttaagtgctgtcacctgaccaccctctatgttacctatcgccaagttgcagacacccacacaataggtgttcagtgtaaatgatgtcatctgtgcaccacaggcacagttctgcaaagggtaggtgctcgcctcagatccaggtgtctgggtgccaacaatgtcagccttactgacaggcctttctaagggggctggggtcttttatgctaattgctttctgcacaagaattgtaatgttccatggaatatgcaggagttagtggatgcaagttgattctagctctctggcgaagttggcttggtttctccatatggatcataatgttcagtagtaaaattcaaatggcagaaagatgattgagtgtctcttcaatgtttgtgtgtgtgtatgcatgcccttgtataaactctttggtagaagagattttacttttttagtgttttgaataggggaacatacttgcatttggatcatcaatcgtttggggagccaatgttactgttgtttgtgaattcaacattcattattttaatttgtcaagattgcaaactgaacttttcccgaggaagaaatacaaatggagccccgtggccctctgcggaggtagccatgctggcgcactgtgagcctatggcctgccctcccctccacattgcaatacattttatccttccagcatcacagctcatctggttgtgctgacagaggcaaaggagtctttaaatgtagccagaaaatagctaacctgaagggcttcacagaggctcaggtggcaagctgcagacacccacacaataggtgttgtgtgggctttttttcttaaagtaatgtgtgcatgtatgcatgtgtgtacatgtatgcatgtgtgcgtgtcaatgtgtgtgcatgtgtatatgcatgcaggtgccctcagagtaacccctagttacttgtaagtgcttcagaattctctagagctgaggttataggtagttgtgagcccccattgtgggagctgggaactgaggttgagtcctttgcaagagctgcacaagctcttaaccactgctctgttttttcagcccctttaaacatgtatgtatgtatgtatgtatgtatgtatgtatgtatgtatgtatgaatgtatttatttattattttcatgggctctttttgaacacagacattacactccatttctgttcatttgttcacactgcatcgttcagaagtggctctgacaggctgcagatttcctgggtttttgtttattttcacaccgattctagtgaacttgctccaggctaggaacaaccatactcaagctgccctaccatccccatcccgtggatgtgatttttttgtatcatttgtgacactgagtgatccatgtatgtttcatatttcataaagctcctctttaaatgcagagtacctcatttaaagttagtttaagactgtgggggttttgttttttggagtttttttgtttttgatttttccactaaggcagaatgagccccttcctctccaatagtcctgttttcagatggaacactttgccttggtgttagcagggcagatctatctaatctatagaagttgggttgggtggtggtagcgattttgtttgcatgctataggacttcacatcaaataaccaaggtacttgaccctagttttctgtttctagctatgcagctagtgttcatctgtttccgttctgctctctgtgagacaggagagggaatcactgatccacatggatgtttcttttttaaaaattatttatcgtatatatgtgagtacactgtcttcagaaacaccagtagagggcatcagatcccattacagatggttgtgagccaccatgtggttgctgggaattgaactcaggacagctgatagaatagtcagtgctcttaaccactgagccatcattaccactgccccacatggatgttcctaatggcgtctatcagttgagggcttcactaggggctaacgtgtcactgccttccgggcaaatgtttagctttcccgtgggttctaatggccattctgactaaataaccaaagtgcagcttatagacctcttctcaagatttgttttagataaaagatagtgacgaacaacctttagcatctgtcagcgttcacttttgctccgtttgcgtggacactggttgcttaagacctggatgtagtttgggtaggcgtccattagcagagccgggctctctctttctgatgaatgcacttagaaataacgaagggaagagcagtcgttaggcaatgctgatgttcaactgatgctctctcattaacttctgactttgcctttcatcactaaagagctcaagtaggaatgttgtagaaattttttctgtatccatttttttttaaatattctttgatgtagtttgaaatgttttcaccatcatattcagtggctctattgcttggtaagtgtttagaaagtgcaataccccacatcttttgctccgtcttctcttgcagactcacggatgaggcacggcggctcattgctgaactgggcagcacttcgatcaccagtcttggtttccgagataactgggtcttctgtggtgggaagggcattaagacaaagagtccctttgaacaggttagtgtctggggcgttcataactgtgggactagagtaggtagtgagactttctcatacagtattctcatgctagttatttgaaaattagactaagctgttactgaatatgtccagatagtttttttttataagttctctgtaagtaattaaaatgatgatgacttaaaaaaaagcttcacaataactttaaaaatgatttccttcttatagaccaatgcattatcatgcttgggcctttaaagaactcaggttattaaggattccagttctactttgatactagaatcaactgaatctgcaaatgtctcaaatagaatatagtttttgacaattcttttttgtttgtttgttttggttttttgagacagagtttctctgtgtagccctggctgtcttggaactcactctgtagcactctgtagaccaggctggccttgaactcagaaatccgtctgtctctgcctcccaagtgctgggattaaaggcgtgtgccaccactgcccgtgacaattctttaaaagtagggttttggggggggggttggtttttttttgtgtgtgttttttgtttgtttgttttgttttgttttttgtttttgatggtttgccacatagctccttgtccctaagggtcatccatttaacatcttgagtcttaagtgttgcgtgaccttattgttgacatgtgtgtcactgaagcgagggcaggtgtgctgtgttcctctacattagcagatcacactcatttttgttttaatgctgtgaatcatccttgtgttcccttagcacataaagaacaataaggaaacgaacaagtacgagggatggcctgaggtggtggagatggaaggatgtatcccccagaagcaagactgacgggaaggagcgagaggcgaggaggaacgcactttgactctgcaggagagtggtcaggcagccgctctgtgtacatatttcagtagcatgtggccgtccagggtgtgcatgagcaagaccgtctctgtcgattccaggattatttattgctaacagaaatggctacctttttgtaaatagtcttcattgagccaatcactgaactatttgtaagcacatttccctgaaagtacaacgtgtagacgacaatggcaataatgtattttaattctaaaagcatattcagggggtaaccacgcaggttgtacaggacgccgatatttatcctggttgctgggaaaccctatcatggaataatgtggcttttagggaggagattttgttcgtatacgtgtctctgtataaaaatctggcatgttatggcagtacccttcaaatgaaagagatttttggctagttgtctgtgtactgtcaccttacagtccaactcctgttgtatcttttcacagtctttatttttgaccttccaaagaaatccagaaataaaatgtttcacacaaaaatttacatcagatttgtgaaaagcacaacagtttttttgttgttgttattttttttaataacagtgaagaggaatattaatgtaggtgtcattcagagctcattttctcaattctgtgttagcggtgtgaattctgtgatgctgtgtaagctgtgtagagtgagcctaggggtaggattccacagaactgggggcccaggccgagtcccttcctcgacctaatcaggtcattcaagacaactgggtcagtacatttagggtaatacaggcatttttctgctttcatcgaccacatgattttaggacaggaatacttgactctcatagccttgatttgtaaaccaagaaattctgttatttatttctaactttgtgatagcagctgttgcctaaacgtgtagcagaagccttgaaaagtcccgattattgttttttttagggcatttgatgtctattatataggtgacatacatccacttcaaatgcaacataaacaagtgaaatgttcatgctgccctttgtgggatgaggccacacgtaaaatctgaacctaaaatttaggtggtttgtataaaaatctaagagcagtatttgctattttgttaaaagctagaagcagcccaggtgtccccttcttgactgttactgacctgcgctactgtttctctcctcaaattgaatgtagttcatgaggagataaataatcgtctgtgctcagagaggttttgtagactttaaatgtagagttctgctgctcctgtactaatacatccagcatggatggtttagcttttctttgtttgtttgttttttgtttgattttttttttttttttttacagttctagggatgggaaaataaacattgcagggttattttgttttttaatactgaatataagtactcttggtttgacattgtgaattttttatttttcatttttgtatttgacaaagcactatacctgcagaacatcccctgaaatccttcctttttttttttttttttttttttggatacatcttaacatataaaaattaagtttttgccattcaacatagtagtatcatatggcctggatatatttgaatgtgtatgaagtaaagttgcttgagaacaggctaaccctttgagagatgggctttccatttgcataagctgctgggagggagaagactggttctgtaactgctgtggcccagtggggtcttttggcctggattctgtcttgtactggttacaccggctcaactcgggaagcaataatcgactgttttatgttcacatcagccttagaagtggaacagtgctcacttactgttgacaacaagttttctttattaaaatcaaaaatctttaacactgacgtgtagtagttgcagtgatgtggggggcgggggtctacaaatgcacttctgctttgttaaaacaacagaaggaaggagacataagcagatacctgggaaatgagacaaagagaacctttctagtcttcattttcatttggttaatggtaaattcattgttccgtatgttctgttagccctctaccttcccctgtccattttaagagaaaagagaaatgtactgtgctcaaagaacaaagcagtctacactggaaatacatttggtatcatttccagccaatatgagaaaggggaaatgcttgttgagcgggtaaaagattggccactcagccaattccttccacctctttaaatatatacgaatgtggctcagtagaagccacaaatggattttcccacttctaaagcatttctaagatttcttttcctgtctttacgaggatggtttttgtcacaagccagtgatcaaccctcacctccgaaatcacttatttctcctcctattactccttcattcttgaaactcttggcatcaaatcaaatcaagggttaaatgggatgaaaaccaggcagctacatttgtaacttgccagttctaagccagaaggagccagtcagtgagctggacagtaacctccttaaccagtgaaacagcaactcctgaggtcatccatgatctccagtgccctgactttcacagtctgtcccattcattacttggaacatcgtaggccttgtcacatgcagaattgggtctgcaaccctataggtggaacaacaatatgaactaaccagtacccccagagctcgtatctctacctgcatatgtagcagaagatggcctagtcggccatcattggtcttgcaaactttatatgccccagtacaggggaatgccagggtcaagaagtgggagtgggtgggtaagggagcagggcggggggagggtataggggacttttgggatagcatttgaaatgtaaatgaagaaaatatttaaaaaaattttttttaatttgtttatttatttattatatgtaagtacactgtagctgtcttcagacaccccagaagagggcgtcagaccttgttacagatggttgtgagccaccatgtggttgctgggatttgaacttcagaccttcggaagagcagtcaggtgctcttacccactgagccatctcaccagcccccaaaaaaatttttttaaaagaaagaaaatcatgcaatcatcagaactgatgcacaaaaatgtattttaagaaaataaaactcatgtaagaactagggaaaaaaaagaattgaagatttaatggtagtcaccacttgaaatctaataaaaggactccacttgcctaggagtgtctttgcaaaggcggaattttcagtgagaattttgaaactattattattgctgttattgtttgctttggaggtagttctaagcacatttcccatgatctgttaaccaccattcaaatgcatttcagcttacccaggacacgggtaccactgtgtggatatggcctgatatgaacaaactcagcctagggacaagtgaattttctgccaagtcttgcttttctgtatccccagtggaacgcgatggcccattgcatgcctactgctaaacagaaatgttaccttctgtagagatgtccctccaagcaggggacacttaatacccctgagactcaggttttcactaagagttcagtgtgggtctcagtgtcttaaacctatcaagttttgcattttatgtttttatgcatgttaacattaatatggaaatatgaatacctttcaattttggctacaaaattactgttcttatgtttggttctgtttactgggtacttgggtaaagacctgcatgctttgacaagaatagaaatggacaagaatttcttgagagttcagtgctgagcattggaacaatttaatcatgttagacgctgtcatctgaacatacatgttcagttactgggcaagccaggagtcactagtgcctataggttgggacctccaagaatacagaataggaggttcagttgataagttttcttaggtgtgagggatgggatctaccgaaggtgccctgcccccagagcttcctgctctttagcagggagctgtgtgttactaagtaagtgaatgagcctgttcctagactccaggccagaataagactgaaagctaacagagctgtccattgtatattttgcaaaatgctattaaacccctttatggatatattctggagtaggttcgctgtggttctagatcccaaagcatgttggatatggatccagtgacaggtattgccacagctacaattttgagattgtttctactttttgtcagtaaagtttaaacttgaaataataagcttggtcattttaagagagaaaaagtcttcaagttggcaaatggaaggatttctcaagataatgaaatttatctttgtgaaattatcctgtactcattaaatagaagttaggtcagagagcatgtatctactccattgacttcggttttctcactctgctgtcttactgtatgcaatttttatagcaaagagcttgagaggaggaaatattactatcctgggagcttaagatatggggatggtagtgcacaggactaggggagagtggaggttatgtatggggccgggggaggaaggagattattgatttaatttctgtgtcccctttgcttgcctgagagtttaagttgtattgaaatatgcagcaaaataaaagactcagtgaggacacaggtttactttagctcattttttggatacccagaactaggtagatataggttataacaacagctgttaggctgttactaagatgtttcttgccagctgtggaggtcagtcaacccctgggctagaccggccatttaacaggaaataggcggtctttgccttactacatttgcttccagttcttacacgtcagatgaaggcttccccatattttgctcattaaacacacacataagaacccttagtttgtgtcgacttcatccacatttactcttattctctcatttcttttcaaagctttaacctggtgcaaacccctacctctggtagtttttctgtatgtgaagttaagtcattacaaatgacaactgttatctatctttgtaaaagaacaccttgtgtagcaattggctataaggacatcagtaaaggtgtatttattttattctgacttagatgattttatttactaagatcatttcttcttggtaaataaaatttcaaagtagaggctaatttcaatcactttgagttccttaaacaactttgtttaaccaaacgatgaaacatctgtaattttatttcccttacagatccctcaaagtttacctggttgtaaacctggtcctgaggaatttgatactatgagatgcacagtaagcgtagtgtggctgtggagggcacagatgttccagctggtccatcctgtgtgagcttagctgggtacttgatagcaagttactatgcttacttacctcatctgggaaatggagccacagtaacggtgcctaatttatggaattgttatgaagattatttgcatatatatttatacatatattcatacacgtgtgtgtatgaatgaaatttattctgccagctatacatcaaatgctttcaaggtgtttgctaaagttatgtttgccttcaaaggaaacgagtctcccatctctgtggcgtcccactatggcgtccccctttcatgatgtgacacacacagccctgctcgtcatgcaaagcatgttacacttgttgcagagtgaaattgaaatgaaagcaaggatcagtacaacttagctcttcttagaaaggcttgtcttggggtctgtttgtggttcttgggggaaagagaacttttttctcaaatcagctttgaagacagcagtgctcccagtaagggactaatgaactagtggcttgctttccagtcagtgaggcctttcaggaggtgattcagaaactatcagtaactcctgaaggcctggcacctctgcttctccagtggccagctccacgtctctccttcagtcaataataactttgttgaattttaagggtcacagttaaatgttcagtactgattttgacattaaatctgttcatatcagtactaacaatgcttcagaagaaggaagtttctaaatatgtaccgtgaatttcacataattctaaagtttcaaggacatgcaaagtcagggcatgtaaatatgtataatgacatgtctttgttcttgcgcacgctcgactggccaggaagaacgacgctgcaacaggatccttctgcacacgtttattgggagagcttgattgtagaggcgaaaagaccccgagcccagaactggtgctgcttatataggcctaggagaggcgtgtctcacatctgattggttaacttgtctctcatcttggcaaaagaaccttcactgcctatgtatgtgtggtggccagcagtagccaactgccactctgcaacttccactctgcaacggcttcccacactttgttatcgctataatgtgtgttccttaaacattagaacaaaccagataccatccaatttgggggtagggaatactgtggtcgtttatgttcaaaagaacgaataggttgtagtgtgctgttgccagagaaatgctttccagattcctcatctagaggatgcagataatgctttgtttactacacttttccttaattaaaaaaaaaaaaaaaaaagataagagtctcactaagtagccttggctagatttgaactcactctatagaccagcgtggcctggaactcacagggacctgcgtgcctccaccttcctgagtgcaggcattaatggtgtgtgtcgccatacctggcttaatttccttaatttcattttatgatgatccattctttcctattagttccaaatcaggaaaacaaagaaagaaacaccccaaaaccttaaacaaacagtacattacttactggcactgttcctttttatataatccacaaggtctgggtttgattttattttggcagtgagttctgcgtgatgccagacaccacaaacatcattagaaggaactagatgtaaagctctgttggctgtgggcatttaaataccttttcctggcaaactaatgtcccggttttcctctacacataatcccctcctcccatgtctcaaactgtctagattagttggacttaaaacctaccacccagcaagggcccagactgctattagacaaatatgaatatatgttgatcaccccctccccccatcccaattgtcattgtgattgcctcagatacgtgcacatttaaaccagtcagtgctaacatcaacccagaagatcttagccagagcttttgggaaggaaacttccctgtcttggaaatatccaactagataatgaactagttttctttagaaggcaagctctgaaagtgtcatcatgtgaccaagagaagcagagatggagttgctaggggctgggggcagggcaagaatctgaggcacaccgcaacagagccttacattcaagacaataccagaagccagatgaaagtcctggtgagagccaagtcaaaggactagggtggccatttactgataatgcttcctccggtctgcgtcactatgttttccttgatgtccatgtcagtctagtctgggtttattgttttttgcaacataaagatagatgatgactcaaggatgactgcaggggtggggccaaagatacgaaggaaaagaccccagatacagcttgggagtgagaaattcttctttggcattctagaatgcacaaccaactaggctttgggcttttaatgcaaagactgaagggttagcagctatcacagaaacagagactcacccagttctcagttgatagagtaatgggaagttttctaattcgttcactacggtcttcctcttttaaagtaaaagggtgattatgttcaaggtggatcaagtagagttactttgtaaaaaagagcatgagagcgccctacctccacatcactctagtcagagaataacaagaaatgggaagcaagtctttcaaattagctctgtatttgttcattggccatgcccacatttgtcacttagcaaatagcaactgttagactttaagggtcacgagtaaacattcaagtcgcaatttataacatcagaattgagaaatcctctagaggtttgcgtttcaaattattgcttaatgttggtttaaaaaattaatagtaaatagatcaaaatctttgataaacattgatcttatcaataagaaaaagtttctttttgtgtctattctgaacttagaaaaactattttccacataatctaaaatatttaacaaagtataaaagcatacgcctttacggtaaaatacaatctagacacagctctgtaacactttgctgggtatttttgtcgaatatgaacatagacatgtggattaaagtaagaaatgggttgagggtttagctcagcagcagagcacttgtctagcaagcacaggaccctagttctgaccttagatccacccataactccccccaccccaataatgcaaagaaaagaaaaaaagaaaaaggaaaaggaaaaaaagaaaaaccagcactcagcattcaaacggcaacattacataaaatataataaatacccagggtatcaaattcaacattattctggcttagattccttttcccagctaaaacctctactgtaaaatttagagtaagaaagcagagctaaggttgaaaaaagaattcgattactctgccttctgaaataatacgatcttcagtgttttgtaatatacttcaatctatagcacagaaaactgtcattttcaagacagccatggctatgcagagaaatcctgtctcaaactttttttctctttaaagaaaactgtcattttgacaagaaatatacatccaggtaagtgcctccatttccccctttccaacgttctaaaaaggaattagtagtatgaaaaaattcaaaagttattctcatttcttgatgtagtcttattattctagtactttcagactttagtgataaatgtctttatgtctttatgttacataagttaaatactgtatttacaaaatataaaacatttgaagtaaaacactatacaaaatactgtctttatataattaagggtgctttctttatttccttccattttcctcagttcctcttaaggattctcccagtatatcacggcagagtgtttaagaatagaaactggtctacaataagaaagacaaattcgaagatttaaagtcatttaaactttgtatgtcttccacttaccccagacaaatcttcttggttaaagacacttaaaaatccagttcatgttttactttttacgttttgagtatatttattacttaacatctttaaaaagactttaaaaaagatgttgcatctctgagtggggattcttttcagtggcccttcttctgaagtatggaagcgtaaaggaagcacccaccccttagttaattttcagcatcttttgtctacgcacaaacaatatcatttatcctattaaaatactagggaaaaatgcaattcatgtgtactgctccttgctcctataagaggtgtcttttaaaaatgatcaatgttcaccaaccatgactgattactgtaactgtgtccccagtctaagatcttatcctgagcctggaccagttctctgggataacgactctactcttctcttctcttctcttctcttctcttctcttctcttctcttctcttctcttctcttctcttctcctttctttctctctgtctttctgtcttccttcctttcttcctctttttctccctccctccctccctccctcctttccttccttcctaccttccctctttccttccttccttcccccctctctctttctttccttctttctccacattgcttcagaaacagatttgatgtttcctgtatatcaatgtatatttcccaaatcatccaaaggcgactgccaaccttttcaacttcagaatcccaagcaatcctctggatcagcttgtgatttgaagcctgccagaaagaaagaaatcgtagactagcccaggggtctgggaacactcttacaggcagcgacttccccatcagtgcacagtaggggcgccctccagatgccaacaccacaccttggttactacagaggcgtctcatgctaggctggacggagaggttacttacacgtgtggacatcggtcatactttcacacctcctgcagcggacgtagcagcaccagataaacttacactcacacctctccacgtgcctgactacatgggtgttgtagcctcggccacagcagaggaggttacagccatctgcgcctcctgatgtccggttgcactctctgccctgggtcccaggaatccccagtttcttgttctccacgcagtagttgggagacttatgaacgtacagcaagtcatccttgagaatgggggtctgcctctggtctttttctctcctgcgcattttcctcttggttttgtctgagatctggatgctgttttcatatttatcctttaaaaaatgcccaatcttttcaaaagaagacatagttttccagcaggttttcacagcacaggagccggaaactccgtggcagcggcagtccacagacattaacttggcgacagcctaaaaccaacaacgattgtgttcaaatgtcattggtgcagtgtttcattcaatagcagaaacagttaaaactagccactcacgtttcttatgctttcgtccataaaaatgatggtttgaacataaaccatctttaaggttgtttagagttcaaatattttgtcatttatttctgtctaaatgttttgattctacacagaaaaccttcccacactacatttaaaacagcgggggaatgggggttgggggagtgcagagggtctaccctgaaggtttgagatggattcctgggaaaccatatggtagaaggaaagaaccaattctttcaaggtgttttcctgacacccatatgctttgtgcagcatggcatgcacattaaccacctatactaaataaataaatagctatataaaatccgtaaaatatattagtgtcaggtcacctagttttgctactcaccaaagatggtctgaaatctcacacatttgcagggggaggggtgagaatggatgatattacgtggctgcctgcatgtttctgataccatttaaagtcttgctattcggagtatggttcatggaccaccaactcaagcatcccttgtaaggaatgtaggcaaccctggctctcagtcagggacaggatgagaagctacactttaaaccggagcctcgggagattatcacacaaagcatttacagggcggttgccttcagcttttccactgcacacatggaaacatcaagagaactgtgcgcgtaactagtttctcacactcttgaaatctgattggctggggtgagctgtgaacatgacatagttggtaccttgttgtgacacatgttgaatctagtgagtcttcctaggtttggtcactctaaagtcagttacatgacaggttaaagggagaatgagaccatgctaagccctggctatagaccacacaagcagccttgcctcgagttaaaggagaagaaactagagtgtggtggctgctgacaaattcccccacttttctggaaaattaattgaaaacataactccagtgctttatggataaacagaattatcttaacatgaagagtaagaagagaagaattgcctggaattgcagttttggggagggtaaggcagaaaggctataaacttgaggctagcctggggaacatagtggaccctaggctagcctaggctgcagagggggatcttgtctgaagaaaaggaaaagatgtccatgttaatata

SEQ ID NO: 3356 - DNA, 2897 bp, Mus musculus
tcggctcggtcctccaccgccagggggcgtgcgcggctccgcggttgccgggctcattggccgcgtcgggaagcgtgggaggaggcctggggcgagctggcttcctcctcggcgcgggcgggcgcgcggcgaagccggaggagccggggaaagccgaggcgcgatcggcgcgctcgggaggaggcggcggcggtggcacctcccgtcggcctccgacaggactgacggcggcgcgaccgcagacgggaccttcttttggagacgtgctagagagtgagaaggcaaaaatgagggtagcaggagctgcaaagttggtagtggccgtggcagtattcttactgaccttctatgttatttctcaagtatttgaaattaaaatggatgcaagtttaggaaatctatttgctcgatccgcgctggactcagccattcgttctacgaaacctccgaggtacaagtgtgggatctcaaaggcgtgcccagagaagcattttgcttttaagatggctagtggagcagccaatgtcgtgggacccaagatctgcctggaggacaatgttttgatgagtggtgtgaagaataatgtcggaagaggaatcaatattgccttggtaaatgggaaaacaggggaagtaatagacaccaaattttttgacatgtggggaggagatgtggcaccattcattgagtttttgaagaccatacaagacggaacagtagtgctaatggctacatacgatgatggagcaaccaaactcacggatgaggcacggcggctcattgctgaactgggcagcacttcgatcaccagtcttggtttccgagataactgggtcttctgtggtgggaagggcattaagacaaagagtccctttgaacagcacataaagaacaataaggaaacgaacaagtacgagggatggcctgaggtggtggagatggaaggatgtatcccccagaagcaagactgacgggaaggagcgagaggcgaggaggaacgcactttgactctgcaggagagtggtcaggcagccgctctgtgtacatatttcagtagcatgtggccgtccagggtgtgcatgagcaagaccgtctctgtcgattccaggattatttattgctaacagaaatggctacctttttgtaaatagtcttcattgagccaatcactgaactatttgtaagcacatttccctgaaagtacaacgtgtagacgacaatggcaataatgtattttaattctaaaagcatattcagggggtaaccacgcaggttgtacaggacgccgatatttatcctggttgctgggaaaccctatcatggaataatgtggcttttagggaggagattttgttcgtatacgtgtctctgtataaaaatctggcatgttatggcagtacccttcaaatgaaagagatttttggctagttgtctgtgtactgtcaccttacagtccaactcctgttgtatcttttcacagtctttatttttgaccttccaaagaaatccagaaataaaatgtttcacacaaaaatttacatcagatttgtgaaaagcacaacagtttttttgttgttgttattttttttaataacagtgaagaggaatattaatgtaggtgtcattcagagctcattttctcaattctgtgttagcggtgtgaattctgtgatgctgtgtaagctgtgtagagtgagcctaggggtaggattccacagaactgggggcccaggccgagtcccttcctcgacctaatcaggtcattcaagacaactgggtcagtacatttagggtaatacaggcatttttctgctttcatcgaccacatgattttaggacaggaatacttgactctcatagccttgatttgtaaaccaagaaattctgttatttatttctaactttgtgatagcagctgttgcctaaacgtgtagcagaagccttgaaaagtcccgattattgttttttttagggcatttgatgtctattatataggtgacatacatccacttcaaatgcaacataaacaagtgaaatgttcatgctgccctttgtgggatgaggccacacgtaaaatctgaacctaaaatttaggtggtttgtataaaaatctaagagcagtatttgctattttgttaaaagctagaagcagcccaggtgtccccttcttgactgttactgacctgcgctactgtttctctcctcaaattgaatgtagttcatgaggagataaataatcgtctgtgctcagagaggttttgtagactttaaatgtagagttctgctgctcctgtactaatacatccagcatggatggtttagcttttctttgtttgtttgttttttgtttgattttttttttttttttttacagttctagggatgggaaaataaacattgcagggttattttgttttttaatactgaatataagtactcttggtttgacattgtgaattttttatttttcatttttgtatttgacaaagcactatacctgcagaacatcccctgaaatccttcctttttttttttttttttttttttggatacatcttaacatataaaaattaagtttttgccattcaacatagtagtatcatatggcctggatatatttgaatgtgtatgaagtaaagttgcttgagaacaggctaaccctttgagagatgggctttccatttgcataagctgctgggagggagaagactggttctgtaactgctgtggcccagtggggtcttttggcctggattctgtcttgtactggttacaccggctcaactcgggaagcaataatcgactgttttatgttcacatcagccttagaagtggaacagtgctcacttactgttgacaacaagttttctttattaaaatcaaaaatctttaacact

SEQ ID NO: 3357 - protein, 227 aa, Mus musculus
MRVAGAAKLVVAVAVFLLTFYVISQVFEIKMDASLGNLFARSALDSAIRSTKPPRYKCGISKACPEKHFAFKMASGAANVVGPKICLEDNVLMSGVKNNVGRGINIALVNGKTGEVIDTKFFDMWGGDVAPFIEFLKTIQDGTVVLMATYDDGATKLTDEARRLIAELGSTSITSLGFRDNWVFCGGKGIKTKSPFEQHIKNNKETNKYEGWPEVVEMEGCIPQKQD

SEQ ID NO: 3358 - DNA, 3118 bp, Mus musculus
tcggctcggtcctccaccgccagggggcgtgcgcggctccgcggttgccgggctcattggccgcgtcgggaagcgtgggaggaggcctggggcgagctggcttcctcctcggcgcgggcgggcgcgcggcgaagccggaggagccggggaaagccgaggcgcgatcggcgcgctcgggaggaggcggcggcggtggcacctcccgtcggcctccgacaggactgacggcggcgcgaccgcagacggattttacagattaggacacctatttcctgagaaagttttaaagttggatggtaatggcggatcccatggcctgagctttcctggaaggaccagtgatagacttaaaatttccaagtctttggaaacattgtttctcatacagtgccttagggagcacagagaaacctccattactgaagaagtaaagttaataacttcccagatgccactcactaagaaaagaccttcttttggagacgtgctagagagtgagaaggcaaaaatgagggtagcaggagctgcaaagttggtagtggccgtggcagtattcttactgaccttctatgttatttctcaagtatttgaaattaaaatggatgcaagtttaggaaatctatttgctcgatccgcgctggactcagccattcgttctacgaaacctccgaggtacaagtgtgggatctcaaaggcgtgcccagagaagcattttgcttttaagatggctagtggagcagccaatgtcgtgggacccaagatctgcctggaggacaatgttttgatgagtggtgtgaagaataatgtcggaagaggaatcaatattgccttggtaaatgggaaaacaggggaagtaatagacaccaaattttttgacatgtggggaggagatgtggcaccattcattgagtttttgaagaccatacaagacggaacagtagtgctaatggctacatacgatgatggagcaaccaaactcacggatgaggcacggcggctcattgctgaactgggcagcacttcgatcaccagtcttggtttccgagataactgggtcttctgtggtgggaagggcattaagacaaagagtccctttgaacagcacataaagaacaataaggaaacgaacaagtacgagggatggcctgaggtggtggagatggaaggatgtatcccccagaagcaagactgacgggaaggagcgagaggcgaggaggaacgcactttgactctgcaggagagtggtcaggcagccgctctgtgtacatatttcagtagcatgtggccgtccagggtgtgcatgagcaagaccgtctctgtcgattccaggattatttattgctaacagaaatggctacctttttgtaaatagtcttcattgagccaatcactgaactatttgtaagcacatttccctgaaagtacaacgtgtagacgacaatggcaataatgtattttaattctaaaagcatattcagggggtaaccacgcaggttgtacaggacgccgatatttatcctggttgctgggaaaccctatcatggaataatgtggcttttagggaggagattttgttcgtatacgtgtctctgtataaaaatctggcatgttatggcagtacccttcaaatgaaagagatttttggctagttgtctgtgtactgtcaccttacagtccaactcctgttgtatcttttcacagtctttatttttgaccttccaaagaaatccagaaataaaatgtttcacacaaaaatttacatcagatttgtgaaaagcacaacagtttttttgttgttgttattttttttaataacagtgaagaggaatattaatgtaggtgtcattcagagctcattttctcaattctgtgttagcggtgtgaattctgtgatgctgtgtaagctgtgtagagtgagcctaggggtaggattccacagaactgggggcccaggccgagtcccttcctcgacctaatcaggtcattcaagacaactgggtcagtacatttagggtaatacaggcatttttctgctttcatcgaccacatgattttaggacaggaatacttgactctcatagccttgatttgtaaaccaagaaattctgttatttatttctaactttgtgatagcagctgttgcctaaacgtgtagcagaagccttgaaaagtcccgattattgttttttttagggcatttgatgtctattatataggtgacatacatccacttcaaatgcaacataaacaagtgaaatgttcatgctgccctttgtgggatgaggccacacgtaaaatctgaacctaaaatttaggtggtttgtataaaaatctaagagcagtatttgctattttgttaaaagctagaagcagcccaggtgtccccttcttgactgttactgacctgcgctactgtttctctcctcaaattgaatgtagttcatgaggagataaataatcgtctgtgctcagagaggttttgtagactttaaatgtagagttctgctgctcctgtactaatacatccagcatggatggtttagcttttctttgtttgtttgttttttgtttgattttttttttttttttttacagttctagggatgggaaaataaacattgcagggttattttgttttttaatactgaatataagtactcttggtttgacattgtgaattttttatttttcatttttgtatttgacaaagcactatacctgcagaacatcccctgaaatccttcctttttttttttttttttttttttggatacatcttaacatataaaaattaagtttttgccattcaacatagtagtatcatatggcctggatatatttgaatgtgtatgaagtaaagttgcttgagaacaggctaaccctttgagagatgggctttccatttgcataagctgctgggagggagaagactggttctgtaactgctgtggcccagtggggtcttttggcctggattctgtcttgtactggttacaccggctcaactcgggaagcaataatcgactgttttatgttcacatcagccttagaagtggaacagtgctcacttactgttgacaacaagttttctttattaaaatcaaaaatctttaacact

SEQ ID NO: 3359 - protein, 247 aa, Mus musculus
MPLTKKRPSFGDVLESEKAKMRVAGAAKLVVAVAVFLLTFYVISQVFEIKMDASLGNLFARSALDSAIRSTKPPRYKCGISKACPEKHFAFKMASGAANVVGPKICLEDNVLMSGVKNNVGRGINIALVNGKTGEVIDTKFFDMWGGDVAPFIEFLKTIQDGTVVLMATYDDGATKLTDEARRLIAELGSTSITSLGFRDNWVFCGGKGIKTKSPFEQHIKNNKETNKYEGWPEVVEMEGCIPQKQD

SEQ ID NO: 3360 - DNA, 2843 bp, Mus musculus
tcggctcggtcctccaccgccagggggcgtgcgcggctccgcggttgccgggctcattggccgcgtcgggaagcgtgggaggaggcctggggcgagctggcttcctcctcggcgcgggcgggcgcgcggcgaagccggaggagccggggaaagccgaggcgcgatcggcgcgctcgggaggaggcggcggcggtggcacctcccgtcggcctccgacaggactgacggcggcgcgaccgcagacgggagctgcaaagttggtagtggccgtggcagtattcttactgaccttctatgttatttctcaagtatttgaaattaaaatggatgcaagtttaggaaatctatttgctcgatccgcgctggactcagccattcgttctacgaaacctccgaggtacaagtgtgggatctcaaaggcgtgcccagagaagcattttgcttttaagatggctagtggagcagccaatgtcgtgggacccaagatctgcctggaggacaatgttttgatgagtggtgtgaagaataatgtcggaagaggaatcaatattgccttggtaaatgggaaaacaggggaagtaatagacaccaaattttttgacatgtggggaggagatgtggcaccattcattgagtttttgaagaccatacaagacggaacagtagtgctaatggctacatacgatgatggagcaaccaaactcacggatgaggcacggcggctcattgctgaactgggcagcacttcgatcaccagtcttggtttccgagataactgggtcttctgtggtgggaagggcattaagacaaagagtccctttgaacagcacataaagaacaataaggaaacgaacaagtacgagggatggcctgaggtggtggagatggaaggatgtatcccccagaagcaagactgacgggaaggagcgagaggcgaggaggaacgcactttgactctgcaggagagtggtcaggcagccgctctgtgtacatatttcagtagcatgtggccgtccagggtgtgcatgagcaagaccgtctctgtcgattccaggattatttattgctaacagaaatggctacctttttgtaaatagtcttcattgagccaatcactgaactatttgtaagcacatttccctgaaagtacaacgtgtagacgacaatggcaataatgtattttaattctaaaagcatattcagggggtaaccacgcaggttgtacaggacgccgatatttatcctggttgctgggaaaccctatcatggaataatgtggcttttagggaggagattttgttcgtatacgtgtctctgtataaaaatctggcatgttatggcagtacccttcaaatgaaagagatttttggctagttgtctgtgtactgtcaccttacagtccaactcctgttgtatcttttcacagtctttatttttgaccttccaaagaaatccagaaataaaatgtttcacacaaaaatttacatcagatttgtgaaaagcacaacagtttttttgttgttgttattttttttaataacagtgaagaggaatattaatgtaggtgtcattcagagctcattttctcaattctgtgttagcggtgtgaattctgtgatgctgtgtaagctgtgtagagtgagcctaggggtaggattccacagaactgggggcccaggccgagtcccttcctcgacctaatcaggtcattcaagacaactgggtcagtacatttagggtaatacaggcatttttctgctttcatcgaccacatgattttaggacaggaatacttgactctcatagccttgatttgtaaaccaagaaattctgttatttatttctaactttgtgatagcagctgttgcctaaacgtgtagcagaagccttgaaaagtcccgattattgttttttttagggcatttgatgtctattatataggtgacatacatccacttcaaatgcaacataaacaagtgaaatgttcatgctgccctttgtgggatgaggccacacgtaaaatctgaacctaaaatttaggtggtttgtataaaaatctaagagcagtatttgctattttgttaaaagctagaagcagcccaggtgtccccttcttgactgttactgacctgcgctactgtttctctcctcaaattgaatgtagttcatgaggagataaataatcgtctgtgctcagagaggttttgtagactttaaatgtagagttctgctgctcctgtactaatacatccagcatggatggtttagcttttctttgtttgtttgttttttgtttgattttttttttttttttttacagttctagggatgggaaaataaacattgcagggttattttgttttttaatactgaatataagtactcttggtttgacattgtgaattttttatttttcatttttgtatttgacaaagcactatacctgcagaacatcccctgaaatccttcctttttttttttttttttttttttggatacatcttaacatataaaaattaagtttttgccattcaacatagtagtatcatatggcctggatatatttgaatgtgtatgaagtaaagttgcttgagaacaggctaaccctttgagagatgggctttccatttgcataagctgctgggagggagaagactggttctgtaactgctgtggcccagtggggtcttttggcctggattctgtcttgtactggttacaccggctcaactcgggaagcaataatcgactgttttatgttcacatcagccttagaagtggaacagtgctcacttactgttgacaacaagttttctttattaaaatcaaaaatctttaacact

SEQ ID NO: 3361 - protein, 197 aa, Mus musculus
MDASLGNLFARSALDSAIRSTKPPRYKCGISKACPEKHFAFKMASGAANVVGPKICLEDNVLMSGVKNNVGRGINIALVNGKTGEVIDTKFFDMWGGDVAPFIEFLKTIQDGTVVLMATYDDGATKLTDEARRLIAELGSTSITSLGFRDNWVFCGGKGIKTKSPFEQHIKNNKETNKYEGWPEVVEMEGCIPQKQD

SEQ ID NO: 3362 - DNA, 938 bp, Mus musculus
tcggctcggtcctccaccgccagggggcgtgcgcggctccgcggttgccgggctcattggccgcgtcgggaagcgtgggaggaggcctggggcgagctggcttcctcctcggcgcgggcgggcgcgcggcgaagccggaggagccggggaaagccgaggcgcgatcggcgcgctcgggaggaggcggcggcggtggcacctcccgtcggcctccgacaggactgacggcggcgcgaccgcagacgggaccttcttttggagacgtgctagagagtgagaaggcaaaaatgagggtagcaggagctgcaaagttggtagtggccgtggcagtattcttactgaccttctatgttatttctcaagtatttgaaattaaaatggatgcaagtttaggaaatctatttgctacgaaacctccgaggtacaagtgtgggatctcaaaggcgtgcccagagaagcattttgcttttaagatggctagtggagcagccaatgtcgtgggacccaagatctgcctggaggacaatgttttgatgagtggtgtgaagaataatgtcggaagaggaatcaatattgccttggtaaatgggaaaacaggggaagtaatagacaccaaattttttgacatgtggggaggagatgtggcaccattcattgagtttttgaagaccatacaagacggaacagtagtgctaatggctacatacgatgatggagcaaccaaactcacggatgaggcacggcggctcattgctgaactgggcagcacttcgatcaccagtcttggtttccgagataactgggtcttctgtggtgggaagggcattaagacaaagagtccctttgaacaggttagtaacaataaggaaacgaacaagtacgagggatggcctgaggtggtggagatggaaggatgtatcccccagaagcaagactga

SEQ ID NO: 3363 - protein, 216 aa, Mus musculus
MRVAGAAKLVVAVAVFLLTFYVISQVFEIKMDASLGNLFATKPPRYKCGISKACPEKHFAFKMASGAANVVGPKICLEDNVLMSGVKNNVGRGINIALVNGKTGEVIDTKFFDMWGGDVAPFIEFLKTIQDGTVVLMATYDDGATKLTDEARRLIAELGSTSITSLGFRDNWVFCGGKGIKTKSPFEQVSNNKETNKYEGWPEVVEMEGCIPQKQD

SEQ ID NO: 3364 - DNA, 67814 bp, Homo sapiens
gcccggctaatttttgtatttttagtagagacagggtttcaccatgttggccaggctggtcttgtactcctaacctcaggtgatccgcccgcctcggtctcccaaagtgctgggattactgagccaccgtgcctggccggttttccatattcttaagcttctttagatgccctttggcatctagcctcaatgtaaatgttctagtcgtataacacaatattaggcatttgtcctggccattttaatttcctgaatgcttgcatttgaacacagtggttatttccaccacagtgcttttattccttaaaaccaaaatgcaatccaccagcctttcaggtccatctcaagctaccttgctttttcataaggcccctggaaaatctacctaaatctagtttacaatggatcagccttctctcatctactgcctcgaccactgtcctcacttgtacttatgcattctttctatctactgtccttaagctttggcatatcccctcaatgtgactacaagctattcagatatcatagtgtgtggattgtctttcacaggatggtgccacattcctattaggggctcaaagaacatttcttgaaagaataaatggatgaattgattatcattcattgtagtgggttgaatggtgccctccccactcccgccccccacccaccgccccacatacaaaagatatgtccatgtcctcacccctgaaacttttaaagtttgaaaaaaaaaaaaaaaggttatttgcagaagtaattaaattaagggtcttgagatgagatcatcctggattgcccaggtggaccctaaatccaatgacaagtattctttttttttttttttttgagacagagtctcactctgttgccaggctggagtgctgtggcatgatctcggctcactgcaacctccgactccctggttcaagcgattctcctgcctcagcctcctgagtagctgggattacacgcacgcaccaccacgcctggctaatttttgtatttttagtagagacagagtttcaccgtattggccaggatggtctcgatctcctgacctcgtgatccacccgccttggcctcccgaagtgctgggattacaggcatgagccaccgcgcccagctgacaagtattcttataagacacagaaaaggagaagacacagagagaagaggagaagttcatgtgaagatggatgcattgattgtcacgatgcatccacaggcctagagagcctgcgttgccaccatggaattcctggagcaaccagaagctttaagaggcagggaagcattctccctagagcctccaaagggaactcagcccagccaacatcttgatttcagacttctctcctccaggatagtgaaagagtaaatttctgctgtataaaccatctagtttgtggtaatttgttacggcagttctaggaaactaatacgtattctattcccttgggctgtttgtagaaattagtctccatggataatggtagaaccatttttatgttacaggctgaaggggcaattgacccaggcactttgcataatatgtactatctgaaatctttaaaatggcaggtgcaaaatcccttaagctctgtcaaaatctgacattcaaattacacgattcttcaagtatgctgtcttactctgctagtcataagtccctctggtgtgttcttaattaagctttatatttttagatcattatagattcacatgtaattctaagcagtaatggatctatgtaccctttatccagtttcttcaaatggtaacatcttataaaattattgtgcaatgtaacaaccaggatacccacagagataaaatccacttatcttattcagatgtccccagttttaatagcactgatttgtgtgtatgattttggtctatgtaatttgatcccctgtgttggttgtgtatccaccaccacagctgagacacagagctattctattgacgccaggatccctcatgatgcccttttgaaaacacacccactttcttctctcttctctcctagccttgaggataacaaatgggtgaatcttaagagaattatgctgaatgaaaaaagccaatcccaaaagactacatactgcgtgataacatttctataacattcttaaaatgacaaaacgatagtgatggataacaggttagtggttgccaggaggtgtgtattctcttgacagtgagatgtatttcaaattttcaggggtcatgtatgattccaaattgtcctgtatagcaaattaatttattaatttaatagacttgtggagaaatcatctgtgtacctgcttctattcagatgctggaaatattccatcactatttcaggaaatgctcaaagataacaagtgagaagcatgaaaatggaatcatatgttaagcccttggtgagatctaccatgaatgagaagctccaattaaaagttctgtctccctcaaggaactgtgaaaaactatgagaggatttgtcatctgagttgaggatttgggagagtaagcagcttaggttgttcagatacaggtgcaaagagtgaagcatgtggcctctggagtcctggaagaaggcaaatggaccagtaatgagtatgagcactcagtaggtgtaccactggtgatggagagatgacagttctgctgggctggatggaagcaatggaaatgaggaggtggaaaatgtcagctcctatgaatcagtgaaggctgtgtgtgaagggtagtagtgtagaaaagaacaacaacaacaacaaaagtaaaaataaaataaaataaaataaaaaattctgcaaaaggagtcccatgtcttagtgctgaagtaagaccgtgcaaatgagttctaggacaactggcggcttgagctgataagcagatacttcaccaaagttttgcatgcaaatcaggggagggtgggtaatggcatttaagaattatttgggaccatagatctgatgtggcaaatgaattgcacctccaatactaaaaactatactaaacattctccaataccaaaacaaaatggaacaaactaactaaaaatctgtgagaggattgctattgttctcatttacagggaagaactggtttagacagactaagcacctgggctgaggtcacttagaatcaattaatagatgtaaccaagatccaaattatctgtctgacttcaagtccaaccctctcacttcagtcctttcaatgagttcaacaatgatcgggggcagggtggcctggaggtgtagaaaagatgaagagatggggaatttcagaaggtgagattatcctggaatctatagaatctgaaagttagttaattccccatgcttgatttttcaaagtaaagtgagcagttttcttggttttggcttcatgaatagagatggaaaatttgactattggataaaacgctatgaaataccagatgctatatttgagcagagcttctctgagtaaataaattacacttaaaaatatgtccaagcctcagcaaggccacaacagttctacagaaaatatttcaaaataaaagtgcaaaaaatgagcagcttagggattcataagtaacctttcctatttaatcaggaaacaagttcaaaatagtacagatgtggtaccttttgtgtggtggtgaggggtgggagagtgacctagaattggaaatgcagttagtgaaacatatttggaaggttaggctgattccagcttcctatctaggtcacaggtacatcagggaaaagcattgttgcacataaaatactgccagcctgtaagttttgaaggtcaatgtcattgtctagaattccaatgtttccatctaattccttggaacaagtattattgaaataagtcatattaggaaaaatagccaacaaatttatgagactatataatacctgaaaaagcacacaaagattgcaataacaatatgcagtgtatatatacatatacatatatatttattttgtgtttgtttttctattgtatatttcttagacttgttatgaccacatgggattttggcctgctggagtgtgttgctgaactatctgtagtgaccatgaaattcaccagagaacgggtctttatgcaatactaacaattgaatgatgttttgctactcatatttctactgttttgcctttcaaagcaaacaatgcattccaatttaatgtaactagagatcttaatgtttaataaaaatgccgtcgtcacagtgagtccttttgtgcttagactaaagggttcccatagtcagttcttaataaagaactgaagttacagacttaagcaattatgttgtaggaaaacagacacttttttcagtatttgttcagttgcttcttctctgagagttttttggtagactttttaaaaaatggaatgtggatagaagtgttttcagatgacttaatatgaagcttactcattgtacttacttagatttatatgaacgttaggggtgtagtcacattttcccatttattctgtggcagtgaaaaacataaagcatttttctccagaagtctgataaatataaatttctaaacaccttatacactatgtgtgtattgtgtatatgcaaggtgtgtatgtgtctgtgtgtgtgtgtgtgtgtgtgtgtgtgtgtgtgcgtgtgatatatttaggcaaatccacggttactgcatcattgtttggcattaccaacagttaacactgccatataagacttcaaaaaaagtattttgtagaatatgatgctgagtcagaaatttttctagagggtaatattttatgacagaattataaattagtcttcagaggaagccactagtaaccttaatagttgcttataattcacatttgtgaacaatttcaaggaaagggaagttattttgcagtcatgattccaatacattttttagatatgggttaccatatacagtatatcatttaacatgattcataagcaagacaaaaatgctaaattttccgacactgaaagacctattaaaacatcaaatccaaactagaatcccctatgcagtgaaatcaaaagtcaaatttatttgaatatttattttttattcaattcatttaaaaattcaaatttttatggtatctagaattttcttgtatgttactagaaaagtaatagattaaaaacttagagtcttttttgtgcaaagatacatttgctgtaatgccattctactgtatcctccatgtttcatagtaaattaaaccacattttataggctgtgttgctaatgtatcaaatacagtgccatgaaatctgtgcgcactccagctttttgaactgtactattttgcccttacaggcaaggatgaagtttaagggttttaaattcacatttttataaaaactctgaataataattttcaaatgacacttagatgtggtattttatcctgtataggtataaaatttgacacgtttactttcagttttattattttacctctctttttctctctcttctgctatattctttagaagctaggcaagtttctggccatcttgccacaggtttgagtttataatccaatataaacatgcttgaatattttaaagtaatcctacccccagagttggtcaactcttttccccctacaaatgttttcttccctgattcagttatttattgctgtgtaacaaactaccacaatacttagtaaattttttttaagtatgttatttctcaagtttctgtgggtttgttggtctaagctgggcagttatgctccatgtggtactgtctggagttactcatgtgatatactcaggtaggagcttagctggagctagaacatgcaacacgactttactcatatagctggtgccttggggaagtggatgggatggtgtggatggagagagagagctaggcctctctctttctgcatgtagtttctcattattcagtagttgtctgagtttcctatatggtgactagatcctgaagctagtgaaaatggaagctgcaaggtctcttagggtctaagcccataagtcacataagatctcctccatgcattctatgggtcagaataagtcccggggccagcctaggttcaagagaagaggacatagattgacctcttgatggtaaaaaacaaagtggcatgaacttacaggaatgggggaattgttggtagccatatttgcctataatttactactccatatacagaaaaatgataccaagtggactcttcttcttgagggtgggtgcaattaaaattctgaggctttttggaaattttgtatttaacaatattatctaattcttatatatacattttttatatattcttatatagttacagtaatataaagcaggttatagttttatataaaatatggcacctattgagagaatgaacattcctttcttttaatcatgatttatggttttgtttttaagccttatgatcacatataattttaaaatttgtgtatatctcctctactttaatcattttaagttggcaaaagcaccattcccaatcacaaatacacagcagttctacgattttctgtttctgaatggcttttttttttttttttttgagacagagtctcactctgtggcccaggctggagtgcagtggtgcgatctcagctcactgcaagctctgcctcccgggttcacgtcattctcctgcctcagcctccccagtagctgggactacaggtgcccgccactacgcccggctaattttttgtatttttagtagagacgagtttcaccgtgttagccaggatggtctcaatctcctgacctcatgatctaccacgcccagcctctgaatggctgtttaaagacaatcctaaattataacttagtttgacttagattgtaaataattcaagagtgaagtttaacttgctactattttaaaagcatattatcttacagatcatctataaaatgtgagaagtgttaaataatctttatttgatattacacatacaccacactaaaatgcctttcaataagtaaaaggaactattttaaatacagggaattctaattagattgacatagttaaggccaaaaatataaagtagacattgctaccttatcttcaacccttgcctttaagaggcaaatgaacacaaaacacaggtgaatcttgcttggttctgagatagtgaaggaatttctccagtatttaaatatattcacataaccagttatataaatccaaatataaaaccaatctccaatatgttttaagatggcattcaccatctttgtgaaaagttgaacattactaacaaagtctaatcaaatcatgtctttagaaagggtaaacagtgatagcatttactgaattggattactattaaaattcaaaaaaactgaacatattcatttaactgcaagccagtcttagttttacatcaggactgcccaacaaaatattctgtcagttattcatgatctgaattctggtgtgtgaggtctattaaattatggtacacataaaaaagtcataagacatttctgttttgtaataaataaggcagtggccaattattattcattagtagcttttttgagataagctatcaagtctgctctttctgccttcttcttaatgctggcaaagatcactttgttccagagatgtgcttcttgggattctccaaatactccatcagtgtatcctctccccaggtgatgcctttgttcttaatggcatctgtgtaaaataatccaacggcttgacctgtcttccatccgaagagaccatggagattaggcccagtcctgtgcttgcctgccttttccacagtgtggcactgggcacacttctgaatacaaatcttcttgcctttctcaacatcatccatatttaatcctctcttttgttgcttgtgctatgaaggatgacactcagaagctggatgtcacactctctgtatattcttttcgagtcaacaaaaaagttgggctttgaagttgagcacgtgagtttgaatcttagctctgtctggtcatagcagaaggaccttgagcaagtttcacttttctccgctgtatttataggattattgtgagaattaaataagtctatatatataaagtgcttagaaaagtgcctggtgcacaataagcacacaataaatatcagctttagaaatatacattatcagtagctattattatataatataaattatcggtagttattgtaatagccaatacctttggcttatacctcctggagctgtaaagctctgtggttttattaagcttaatcattaatcctgaatacttctcctggctcccctacctcctgccaagtaaaagtaggaagttatccttactcgtttataggtgtaagaactggctgattaacaggagtcctaaagaagtgatttaccaatgttaaaaaaattgaaacccatattaagaaatataatttctactgtatccaggacatagacacacagacactcacccacacatgatgctgtacaaatgtttcatgaagaatacttatcctgaatttatgctttgaactgtttttttttctatttttcagtgaatcaacagcaacaaaatgttggttgtgacccattgttattaatttcattacctaccaaagggttctaagctatatcttatggtcagtggagaataggctactaacacattagactttatgcacaggaattgtttcaggtgtggtgctataagaatatgtcacatgtaatttccaatctggttggctcggttacagagcagattgctctttcagaaatacaccgtgacctccctactcaagaggcttcataaactctttcagtgagacatagcagtctaggagaggcatgtgtacagtaagtgttatgattttttggtactataataagcaaagtgcctttttgtttatttggagctacatgaagctaggccggaattccagcttcataacttactatcttgtatttttgagcaagatatttaaactcagttttggagtcttagttttttgatttaagtaatacacaaatagcataatattggcacatggaagacaatgagaattcatttcatgctttctcccctgatcacggatcacaaactccagaattcatagttactattagtttgtgtgttttatatttttggaggaaagctaaaatttggtagattattaattctatattaacacactatagtcaaaccctatttttaaatgcaatttaatttctgcaaccactgatgatcccaatattctgtcaaatactaggtaacagttattcattattttagaatatggatctgaattatgaaataattttgcattctaaggtcttatgtagtaagatttggattaactttccaattatcaacacaattgtaggaaatctcctgagaaaaaatatttctaacgattgtgtatcttataatttaaaaaataaacgtgacttggaaaatgcaaggactactgttcttcttgggtggtgcattaaaggtgatcagaattctaatgacgctggacagtaggattttcagaatcagtttcctagggttcaagaagtcaaacggcaaataacccaaggtccttggttgatctgaccatctcagctatctcaagatatataagatgacctaactggcgcatctctaggatgggtgggtcatttaaaatgttctgcccttgaggctgggattttgtgcgtgtaaacggtggggagacggcggtgacacatttttctccctcccgtagtgccacccggcgcagggccgctgcggcggcggcagctcccacgtggcaagttcagattgtgcagcgcctggccgggggcggtgggcgggaccgcagacccctccctccgctctccggcccttccctctggccggcccgggcgcccgcttggtcctccaccgccagggggcgggcgcggcttcccggcggcgggggcccattggtcgcggccgggaagcgtgggaggaggcccagcggcgagctggctttctcctggccacttgccggggtgaggggcagccggaggagtccgagaggaagcggaggcgcgagctggaggcggcggctcccgtcggcctccggcaggactgagcgctgggaggccggaaggcgggcgcgcgcggcggagaggcgggcgggaggccggtgagacggctgggaggcggacggagccggggctcaggttcggggagggatggaggaggccggggaagccagacgcccacctacgacttcagcctccgcgcactgcggtcaccggccgggggcgggccccgggcccggccgcgttgtcacggcgtgtccggacgttggagagggcgcaggcgggactggggtcccggagagccgctggccggggttcccggccgccgccccggcgtgggcatccccgggctccgcggagacggggcggcgtctgcacctggcgctggcactcggcgccccggcctggggcgggcacctgggtcgcatcttccccaggttggctgtggctcgcgcccctgcagcgtgtaggctgagagctccgagaggtggggacggagttgggtgttgcattccaactccatagggggccgttttgactcacttgtaaagttttagtgtcgcctatactagaggtacttttggttttttacaagctatccagccctttgatgtttggtgtctcttctttttcttcctatttgtttgctactgctctcacagctcgggaccacggatgatgattagtggccctagatctgaatatgtgagtgacggattggcaatttgagattgagagctccagctgttttacttgtgggaggagcggtttccatcatcctctaccttttttttttttaagaaaaaatattattgcctgtaatatagaactgctatctaattgataggacttttcctttgtttctttttggccaacatggtgaaacctcgtctctactaaaaaataaaaaaattagccaggtgtatgtatccatatatatatatgtatgtatgtatccatatatatgtatgtatccatatatatgtatgtatccatatatatgtatgtatgtatccatatatatgtatgtatccgtatatatgtatgtatccatgtatccatatatatgtatgtatccatatatatatggatacaatgacataaataatattagattgcttactgtgtactaggcactgccaaatggtttcgtgtgctcatttattctcacaacagctcagtgaataagtccctttatcttttctagttttacagatggaaatatgaactcccgagagtaaaggtcaatgctgatagcagaggccccgaccccttggacttgtggccaatttgcagttacgttttcttaagtcttgggaaccgttactattagtcatacagtatcttacagagtaccagcagatctctattgaatttagaaaataaaagttaatcacttactgaaagccatttaacaagaaattggcagaatcagcaaatcagcatccggttttggtcacttcatcgacctgtacctctttctagaggctactagtagtctcttgtgtttcttggctgtttaccaataaagtcacaaggttttcagttttatacaggtattagaagctttgtttcacagattcttgtaatgttttctcaactcaataaagactagcatttcttcataggaagaaataagaagagttggagccaataaaaggagttcagtccagcagttctcaacctgaggacctctctgaattaccaatgggaactttgtaagagggacacaggacaggttcctcaaaatcctcattgtaaggggcttctgtttcaaaagggagtaaaaataagacactactggcttaaagtgactttaaaaataaacttaatggatgttttattacaattacagatttttaatgtggattgctgccttaagcattgtcaactaatctttcataatttatgaagatacattaaaaaggaaaaggaaattggaaaagacagccaaaaggctaagaggctatggaatggcaaaaagtaatgttccctgagggggtatcagaagactcatatattttccaccatatattttaggttttgaacgattcatttttcaaaaatttttatactcttaaaaatactggagtgcctaccatgtaccagtaattgtagatatcatggatactatgaataagacagcctgggcactcacaaagctactttattttctctaaagcagggaatcttttttatttttatttttatgcccatttcttaaagctgaaaggtgcaagacccaaatagcaaaagatttttatgttagcgctgagctagatagatttttgtgcgaccttggtataatagcaaaagtttgtcttgaatttagtccagaagcgtctctgttcttgggatcagatgatcaggatttgaagcattgattctgtatttagttatttcaagagtggcattgactaaattacttaatatcatgcagtcctttttaatctgattgagtagactgaaccaggtaatttcccaaaatctttgaacttttaaaaggttttgtactttcttttaatgcaattctttgagacacaatcggctgacttcctctcagaggaggaaattaagtgttgtaatacccctaagtctttccagtgtacccattaatattctttttcttcttcattggcctgctccatttgattgaagctattcttatatttcccttatttttaatctaattttgaaaatccgctattcatgatttttctaacttcagtgagttttttcttccaattttcttttttaaattaaattcctgtaacagaatttttcattttatttttaaattatttacaaagacagggtaccccactgttctgcagactggagtgcagtggtgtgatcataactcactgtagccttgaactccaccttagcctgtggagtagctaggtttacaggcatgtgccaccacacacgactaattttataattttttttcttaaaagacgggatcttactattttgcacaggctggccaaatctgccctcaggtgatccttcgacctcagcctcccaaagctctgggattacagacatgagcccctatgcctagccagattttccattttaaagtgtggcatttagcacgttcatgatgttatgaaccgtcacgtttctaaaacattttcatcaccccaaaaggaaaccccatattcattaagcagttgttcattcccttctccctgccaatcctcggcaaccactgatctgctttctgcccccataaatttatctattctggattttcctaaaaattgaataattcaatatgtgttcttttgtgtctggcttctttcacttagcatgttttagaggttcgtcctctaaatcagcaggtatcagtacttcattcctttttaagggtgagtaatattccattctatattccattcatatacaccacattacatatatatcatttcgttgatacgtactgcattttgtttattcatttgttaaatttttgtgtgctattcagaaagttatatgaacatctctaaattgattttcgtcataatctctacaaggcttgctaaggtagtgttatggtgtcaggtgtgctacctaacatatcattcattacttgcagttaagtgattgttaaatgagttttgaaagacgcaaggtcaacaaaaatggatttttaagttggttcagttgatacgtggtgtggtttggttctgcgtccccactcaaatctcatctcaaattgtaatccctgtgtgtcgagggagggaagtgattgcatcatgagggcggcttcccccatgttgttctcgtgacagtgagttcttacaagatctgatggttttacaaatggaagtttttcctgcactctctctcttctctctcctgctgccttgtgaaaaaggtgtctgtttccccttagccttcctccatgattgtaagtttcctgacacctccccagccatgtgggactgtgagtcagttaaacttctttcctttataggttacccagtcttgggtatttctttataacagtgcaaaaacggactaatacaatacgttttcacaaaattttacaatagaagcatctttagagtttatttgaacaaacaattcatgaattgagcagctccaaaccagatctgggagctccaccaggggaatccaggagggaggcttttataggagggtcacagatgtaaagcaaagaaaatatttgattggctgcagttatacagttgttttatttggtctgtcgtgttggaaggtcccctagatatgtaattagaagtttgttggatgtttctgattgattaagcttaagttctctttttctttagcataggcatttataagaagtaacttcatattttgcttatgtttgcaaatcaagtgaggttgatgtcacttatgaggcctaattggttttgtctgctcggggattcttcaggcatggtttccattttaatttacttcagcagtgctaattctcattcagtttttgtggtacaaatggtgtgccaatactgcatttcatccaggacccttgggcgatggaaccattctgtttctccatgtcttcatttggagggtgtgactgatggaattatgtctaccctggtgcacttaaattctgcagactacttcaaaacagcataagtagagtggatacctaagggaattcttaaacacgtagaacaggaacctataacttctcatctagtacaatgtgagatagttacatgagatgaagatagcagttctactgtatgtaaatgtgtacctttctctaatctcattttagcagtttatgagtgggacacttcattaccccatttatgttcaacctctaacagttaatatatttcattttattgttgtcattgtttctaagaatagctatttctttctgtccatccattcattcatctatccatctctccctggatggtgtactataggattaaggtagcttagatcacaagtgtttaaacaattgtagaactcatagcaggcaaaactgaatgtcattttgtagagttctgtcttgttttctgttttgggtatgtttgtggtcttggttgcagaaatccagtcaccatttcatttcgttaagtggattataactttttaagcaaaattctgctttggtagataataaaaactgcaagaaaacatttgagtaatattaaatctagtactctggtttaacccctgcaaacaggagttcttgattatttattcctcaccacattttctctggatttatctgttgcccaccaaaactgaagacccattctggtggcaggttgactgttccagaaagaatgaaaaatcttgtcatgtgaattttacttttgaacttttttggtttagatctgccttaccttcccccccccccccccccccgccccacacagcctttcctgtgtgtgtggattggtgtgctgtagatctgaagctctcagatctgagcacgaatgacagtcatctggggagcttattaaacatgcaagagctttaatcccactcctagggattctgattctccaggtatgcagttggctcaggagtttgcattttaaaaaacacactagtaattctggtgtgcatgctataggtaaccctgtagtaagaggttcaaagaacatatgatgtttcattgaatctatgacgccacagatggtaagggtcagaatctggtagctttcagctgcatgactcctaagccctaatttccaatcttgtggctaatttgttagtcctacaaaggcagtctagtccccaggcaagaaggaggtttgttttgggaaagggctgttaccatctttgttttaaactataaactaagttcctcccaaagttatggcctatgcccaggaatgaacaaggacaacctggaggttagaagcaagatggagttggttaggtcagatctttttcaccatttcagttataattttgcaatggtggtttcactactaagaaataaaaatgtggttgtaagccttatcctgagtttagttaaaatgagggaagcaagatgcaaaatgagtttagttaaaataaatagggtattaagtgcctggcaaccagaggttcctcttattatcttaacaggttattatgaagcatagcagatatgagattttaaaaaattacaaagcaacagttcttcagatcttttaccatataaattatttgattgcaatgaggagtttatataaggtgtccttagttgacatctatttgtaatgaaaattgtactgatgactttgttttaaaatgcaacttaggtgtatatgggggtgtaatagactccagtttggccccatattaatttcatcctactcatttccagtcatttagatgttgctggctcagttcagaagtctgatttctatcctccttgtacttcagtgattcctgttttgtaattatagtccactgaaatagtaaggtgtggcataatcatttgatgtctacctttttttttttttgccactttcctgttagagagtccacagccctcattaatgccagctaggtgattatacacatatataccagccgcatagcatcttgtactgagtagtggtaggatgtaatggcaatatttggggtaaacaccaaatctgtgtcagtgtaaacctgaactctggctgccaactcagaaatgctgtagtggcatattgggtactgaatgagggcttatctgtaggttagaacaaatctttccccattaatgagaattcagtgaagagcaaccccacctgcttaaggtgcttccttcagtagtagtagcttggaaaacaaaatatcttttttaggaaaaagttgcctagccatgttatatttgggtatagaggagcagaagagctcagatccatttagtttttagctccttgaagtgtttttggaagacatggttaaatacttgttgatccactaaataccagatttctgaaaagaataactgtaggtctctttagctaattcacattgatttaagggggttgtactatgaaattcttaacattgagatgaatcatgttggaatacttatgttctcagaatgtagtgtgtatggcctgtcaggcttggctgcctctccctacactaagtctttgggtaaaagttggcctagatggggcactttcatgatttagctgagcacttttgctaacctgtttttaagtggagggagaagcaggtattatattttaccaatttcattcttagaagaatggagttttatctaaattgctgtagatagaagttttccgaagtgtttttctccattcactgtcaggagcgccaaatgaaaaacaaggtagagcagtttatggtggattgtggaggaaagctgaacttgcctagtataatcccaatttgcttcatatctggcattggttaacattctaggggaaatttaaaaacactttctggctcatttgtgcttttccatagtatacttctaattctatttctgtttcttagccacatttagatgttctcttttaaatgtaatttcaatatgatgctacttaagaaaataagaaaagccagatgatgttgattcagaaaactgtcaaaaatctaggcatagatcatctgtattcttttcccaagattttcaatagaacattaaacatttattttaaaactcttattggttcacttgacccattgtttataagtttttggtctgttgctttttgggggacactttgcagaaggagtggatacatttacatcataatcattggtgatcttttgaaaaatttgtcattcctagtattatagaattcatatggatcacctctccccacacccccaattttgtttttgttcctttttttcccttttcaaaatgtgagtttagcttgattctttaaaaatctgggatacttttctagttgctggtagtcatgtaaaaatctccctttatttgtgatcaagtcatacccacctctgaagctgtacaacaggagtgtgtgagtgtgtgtgtgtgtgtgtgtgtgtgtgtgtgtgttaaaatggtggtttcttttaaaagagtgtaccttctaggattcggtatcctgctagtattaaatactttctcaagttagtaactagatttttctttcaagcctttagtgttaaaaacaccaaattttgttaaatttacaatatttctaacacaatgatagcagctcagatatcctactgagtttttaaatgttaatattttttcaaatgaatgcagtcatcttattcctttccattttgttatttcaaaaatgtagccagctttgcaaagatgtgtgtatagttgcattcaggggagacagggtacttgacagccgtctgcatgtgcaatagtaataacttgttattaaagacaaggttttttaaagctaaatatttggaattttagaagtttgttaagcattagatgcacatttacttcactctttttttaaacctatcataaaaataatcccatataaacacccacataaaggaaatagtaatgtaagttttttcccaagaacataatttttatagttactgaagtgtaatatagtgagattaatttttattggtttctttacatttcctgggattggtttggaaacataacagcatctagatttgtttccacctttgctatagatggatagcttcatctacaggatgggaaggacttttttcttccttttgaagaggatccattctgttgtttctcatggaattatgcttctttctgtggagagcagattatgaaaatgtttgatgaacacgtgtggagcacagaaattaggattgtttcatctgtcctacatctgtagtagtacttctaagaggacctgtcaaagccatgtggaagttgtatgtcctacacgtagcccagcaaaaaaagttggactgttagagcctggttgggaaagatgtttattcctttatttttaaattttatatttttatttctttttattaggggttgacaaagtacaacccctaggcctgtatggcccacaagccaaaactggttttcacatttttaagtgggttgaaaaaaaatcaaaagaataattttgtgacacatgaacattttatgaaatttaaatttcagtgtctataaagaaagctttattagaatataattagactcattcgttcacatgttggctatggttgctttctagctacaactgcagagtggcgtaattgcagtagagattgtatggtccataaagcctaaaaatatttaccatctggcccttttatagaaagagtttgccaacagttgccctgttttactcacataaaagtagttatttatagcaaacacagtattttttaaaaaataccatgcttttgtttgtaaatgcaacatcggagtaacctaccctagtgactctttgagttgtagcattcttttgattttagtattatctcatttttctcttttactttaaatgctctggggataaaaatttaattttttacattctgttcttgagggggtctgtattagtctgagttctatagaaaaacagaaccaattacatatatatatatatatatatgtgtgcgtgtgtgtgtgtatgtatagatatagctctagatatatagacatatattccttataatacatgtggagatagcttcatttatatacaggtatatgatttgtatgtgcgtgtttgtgtgtgtgtgtgtatatgtttattataagggattggctcatgagattatgaatgctgagaagtccaagatctgacaagttggcaagctctgacagtccaggagaatgaatggtatagtctggtctgagtctgaaggcattgtctcagtttaaagataggcaaagaaggcgaattctcccttacttattagaatcccttattattagaatcatgggaactttctaagttggttgggttaaaattgtcatttgtccagcactgagttgaagtaggattgaattgaatgatagtttctctatttgtagaggataacttgtggtattttcctgtggtttaattaagtgctgtttgttaatattaagtaggtacatcaaagggtgtatttgtacgtttaattttcttgtatcatttccatttcaaggaggggttccaatacccaagcttagtcattttgccatactgttgaattgctggagtgggtagtttgtagcaattcccaaagcagtttgcaaaagccaagttgattggcatgacattttgtcaacaagcctcttatattagagtgtgtcagtgaacagctggagtgaaaaggaagtggatttgtttgtagcgtgagcttcttacttacccttcatgtgaccctagagaaatcccctgatctcatatatgctgctgttttaatgcccccagcaactagaggctggtgggaagattacataaaataagggtgtgtgtgaattgcactgacataagtatgtattcatacttggtttatgttaactggcaagaaatccccctcctggtaaataattttttatgacaattttgtcaatatagagtgatgtttctgtggtttatgtgatttagtccacttcccaaggaaataatggaagtatcacttgacctttgattttactctgttgttcctgaagttaatttattctagaacaatgactccttattcacatagtagcttgatttctacctgagtaataaaacttcactaaattagatcagagtagatagtggggccaaaggaatgtttaaattgtcaaccatgtaaagaagtttagtacgtccatctgaggccctagttcaggcgctctttccagctgcagtgtttcattgtccagcgacattgtggtggctgtccttgctgttgaatctcaggtgattatgaaccttacatattagcaactggatttggttcagtgacatatatttatcaaaaacactaaaacaaattttggcctatgtaacactttttggagcaaatgtataaatgtactaagttgagttttggggttttttttccatcctaaaaatatccttctgtgactcattttctggttttggtaagtggctctaatatctatatttctaccttttaatgaacatacttatatataagccctttcgcctgttgcctctagatttagagttctgaatttctagcaaaggcctttttctccctttactattgtgctccttttctctggacctgttcaatccttgtttaattattgatggttttcagcctgaagtttccattaagtttttgcttccctcacccatacaagataattgtatgtaaatattttctttgcttttacatgccccctctaagaagacaaataggaatgatttagaattagcacattatcatcatacatagatgctccttgatttgctctcaaatatattcaatactcctatcctgatgtagattcttgaatcattaatttgcttcttaaggaaattaattgaggcatgttatggctgagatttaatttgatgagattttaatttagaaattttactaaatgtgaattctctgagacattttaatggaaaacagttgtattcagctagacaatcatcattgcttatattgtggtcttagggatgagtttagaaataggtttgttgggagatacaaatgggtggcaggtacatgcagcatccactgcaaggtgtggcctgagcaggccatggaaacagtgaaatagaacatcaagtacctggtgcgtaactgcttatcacactttcaaagaaattttcctaggtcacactcagataagagtgaagttattttggaatattagctggcaggaaaagcatgtatatgttatgaaagctgagttcagttttgccagaagccaacagaggatttataaccagttggggttttcatttaaaaagcggaggtttttttctgcttttatgtgatggtttgtggatacttcagtatcttgtttccttttagtattttcctagcctgtggctaggtagttgaaatagatatataacattgactttttctattacgtggaagctgttcagataattaacaaaggaaatcaatgacacacaactcagtttaagtgttgttttttctttagggtatgttgtgcagaagaaagagagctagcctaagagcattggacttttgggagctgtccagactcccccgccccccagaaccctgctgaagcccacctgcctagtccagtgaataaaaaaagtgcatgtctcacttcttttcagtgtccttcagagatgtgccattattactattttcttgacacattctgtgaattactagatcaggcaacaatattgaaacataaatatcaaaatacaatctaaaatagatatgtactgctggcaaatgggattcatccatcaaaatttccttttgaattccattcctttacaataggttgagttgactgtggaagctctccagctaaacttgaatgtggctttcttattaaacttacttattttttcattttcttttcaaaatgtcacctattttgagttatttcttaggaggaaaacacccgtgcacatacagatttttttccagcatctgtttcctgttgatcttacagtaatatcaaagaacagttgatccatttgatgtattaacattactctgtcaatcatgataattgctgggatatttaaaattgcagttctgtacttcttaacatattattttacaaacttaaatcgaaaaacatgaagaggtccctggtattgaaatcggaagcccttgccgtaaatgcttatggtagtggcacttgaattatgtcatatcaaaaatgaagtggcatcatgtactggagtgagccagctgacctcaattccagccccatgtctacaaataatttgttccacaactagataagcagcttaacctctttggacatcatctgcaaactgaaggtttggagctaaatatcaaaagtttcttatagatgcataatccatgagaataagaaggcattctcttctattcacaagcttgataacacacttttactctttggtcattcagttagctgaagacacagcagggtaagacagaccctccttgaggtcttatggtccagtggaagacaggcccattttttttttttttaatgccaatgttggcataatacttagaaatgtcataaaatttactagtttatatgccccatttcaaactcaatctaaggaggaatgtttgctctagagctaatgatatttgctttttgttttgattttttaggagcatattaatgaaaagtgccataaactgaaaaaccaaacatgagggtagcaggtaagatatttaatttagtagaagtaattgtactttttgtgtaacctgtttgttaaagaataactaaaggagaggttaaataatctttatattgagaaggttaaactgaaataaactaaatcattcagccctttgtttttaggtagttggcaaatcacaaattggacatttagtcagtatcacataaatttttttttttgttcaagtcttttgttgaaattacacattgagcttcttaaatctgaagatctgaaatgctccaaaatctaaaactttatgagcagcaacacatgatgctcaaaggaaatgctcatttgagtatttaggtttcagattttcagatttgggaagttcagctggtaagtatgatgcaaatattctaaaatctgaaaaaaaaaaaaaaaaaacctaaagactgtatataatgcccatataaagaatggtttgacaacctagggaggctgatttttgtttttgctatgttctagcgtcttgagaaaaatgagttataaagttttaaagtttaaatgtctcatatgtatgtacttaaattaagatgtgtgtgaaggattcgataaaatatgtgtttttgctcagtatttgttcaagtttaatctgcataggtgagtttatgtgtaagaactttaatctgtttattaagcagcatattgagaaaattgaaaaacaccattagatgttcataatattaaggtagttatatttaaatattctaaaaagacacgtttataaataactggaggggctgatgacctcttcctgtgtagtaaaaataagtctgtttttccccacccttcccatcaaccaaagccctagaagaaatgcatactttacatggaaatttctactaagcgtgtgcccaacataggtaacttgtaatttctcaaaatcaagataattagtctttttcttaattgtcatctcagcagcaaaccaattattttcctaagggagcatctcttagaaatgcctaaagtcaagctgggtgaacaaaccagtcttcatactgtggtcataattgtgtagaatcaggcgcaattgattaaacatcatgattattaaacaaagataactgagggctgttacaaatgcttttgtagaaacttgaaaaactgaatctcttgtgaaattataaagcaattttaaaaaaagtaacggtacaattgttcaagaaaaatattctcagaaacgaagaacttgtttgtggtctaaataaatgtgttgcaatgtctttttatgttgcatgcgtgtgtgtgtgtgtgtgtgtgtgtgtgtgtgtgtggatgttctttgagtacagcaggacttactatttatgatgtcatgtctccagatgatttttaaagtacattatttaagcatggcaatttgaaataaagtaagtttctctttctcacataattttaaattcatgttatttgaaattaactttgtcatttagtccatttctctggttctgacaattcccaggttaattgatgagtaattattcactgagtgcttattttgtgtttggcactgttcctagtataggtcttgagggaactgccttgaatgaatgaataaggacaattagctattaatttattgcttttaactaattaatctcttctaatttttttaaaaaaatctgattgctttgaaatatcctcatagccattcttcttacagtgaggcatgaatgtctgaagtttgtacttcttggcttgtgaaaaactggagcacactgatattagtgcagtctgtgactaggaggaagagggaatcttatggaaagctaagaatgggaattgtggttggtatgttaggccccatcaagtccagaatgggatgctggtcctggagtcaggccagctttgggggcgatctctgtaacagaagttccagaactctaaccccatggagactgctagtttctccacctctaacttttgtctgccttagagcttttctttcctcctagttcctctgatggttcagtgtaagtgaacaggtcttggtttaagactcaatgttgccgctgactagttatgtgaccttaggcaaatgatgtaaaattttagccctgttttccttatttgtaaaaggaaaataatgccttgcaaagttatgcaaatgagattatacttataaagcatttagttctacagaagacactaagtaaacggtatatgtgagtgtcatatatatatatatatatatatatatatatatatatatataaaatgtttgtatatagcttttttaaaacttttaggctcaagggtacatgtacaggttcgttatctaggtaaaataaattgagtgtcacaggggcttggtgtacagattatttcatcatccaggtagtaagcatagtacctgataggtagttttttgatcctcattctcttcccaccctccaccctcaagtaggccccagagtctgtttttcccttctttatgtttatatgttcccttctcagtgtttagcttttgcttatgaatgagaacatgcactatttggttttctgttcctgtgttagtttgcttagtgtaatggcctccagcttcatccatgctgctgtatatagctttttttaatgtaggcttacatttagcttggtatagaatttagaatgtttgtgttatcgtcttgatattttaatttttcagttttgaacaatgaagttttcatatgactgttttacaggacagggaaaagttatctctggttgcatgtgcctatgattgctagaaaataagatggtaagaccatcatgtgacatgtaatttttgagctcttggtcttagtcttaaatgatcaagaaggactatgccacctgttaccatttatctacttagcaaacagttgttgatagtatcagtgtatacagtgcactttgctagatcctggggagaagagttcaaagcctaacagaattttgctctcttatgcactaaaaatgtaggcaacttgtaagttgctcttgaaaataggaagcagattttggaggggacaaggtaggaaatggaaaagggaggcagggattgattagtattatagttagacttcctcattgctctttcatttctacattaatagtgtttctttcggattttttaagactttattattttaaagcagttttaggttcacagctaatttgagaggaagatgcagagattttctacatactccctgtcccgctccccatgtagttatcagtagagtgtttctatacagaaatgagtaggctgtgagaagcagtagctctctgagcatcatcagttcattgaagagtctgcgcacttggagctttccatgtaactgtgttatgaagcatatgtgataggtaccaaattatatcctgcaggaatggagaaggcctgtcttaaggtactaaggtattaagtatgaagaggaaggctttgttgatcgccacaccaggagggcttatgtagctccaggagatgtgttggttagtgataggacaataaatctgtaacatgtcacttgagaattcctcgcttagtggacattgtggccttagcatccccagaagttccactgtttttgaaaaatcctatctagtattgctccttatatttatgaaggataaggaatctgccattcaacaaacttggtggtggtgttccattagtcatgacacttttttgttgtcagcaactaataggtaatttttttgcatataaaactaggcagatggttcaagcagtcctttggatagctagataatctgagaattctttgatcaggaaaattctttatcttgatgaattgtttgtataatttttatgtatctcatgtaaaattaagatctaatagatacaaagtagaaatgtattgatcttaaaaaatttataaacatttttcatagaaatgcaaaataaaagttctgtgggcttacaaagttatgctgaaatacttctgccttttaggtgctgcaaagttggtggtagctgtggcagtgtttttactgacattttatgttatttctcaagtatttgaaataaaaatggatgcaagtttaggaaatctatttggtaagttttatttttttcctttcttaaatcttatttttgatgtggcctaaagttttatcagttatcagcactgagtcactcagtgctagaaaacgaaatgtgattattatatatccataaatatgatttgttagaatattttacagtatataattagatattttggaattaatttagtataaaacatgaatcttctattcaacattttgaacatatgtaatgagtctattttatacatttttaggggcattaatcatggcattctaagtgcacattctaaaacataaaatacctccaggcttaaattgttttcctgtttaagttggctgctagaaaacttgaagccaaatctagccctcagttagccatatgattaggagtcacggtaatgcattttagataccagccatagaaatccgtcttgcagctggctgtggtggcttgcacctgtaattccagctactcaggaggccgaggtgggaggatcactggagcccaggagttccaggctgtggtgagctgtgatcatgccatactgcactccagcctgggtgacagtaaaacctcatctcttaaaaaaaaagaaagaaatccatggtgctttcttatccttattttccctctgtggcattttttttttctaacccactcatttaatgttgccatactgtaaatgtaccattataaggtaccttaacccagttttttaacagaatccttacgttcataaaataacatttgaaatgttttcatatgaaccagttatacatagtgctattgtagatgattgtatatgaatatcttattgaatctcaaataattgtgaagtatgcatttcttttctataaatataccgctataagactgaataatagaatttaattttgacacattaaagtggaaaacaattatttaaccaaggcgctatataagatcacagtcatgtgtcacctaatgatggggatacattctgaaaaatgcatcattcggtgatttttgtcattgtgagaacatcatagagtgtacttacacaaatctagatggtatagcctaccacacacctcggctacattgtatagcctgttcctcctaggctacaaacctgtatagcatgttactgtactgaattctgtaagcagttgaacacaatggtaagtatttatgtatctaaacttggaaaaggtacagtaaaaacatagtactataatctgatggcactaccactctatatatggtctgttgttgactgaaatgtcattaggcagcacctgactataattctgaatctcttcgggaaactatttttgtacacttttattattgaagctagagaaatgatgagattcttcatagatccttgtacttacatcgagtaaactatgactaaattgttgtttataatattaaataagcataaaaagtgatactataaaccctagaaaccatattttggtctagtgggcagaagtcaaatgaaagaactgagattgctggactactgagttttgctttccataaattcatgtttgaaaggaaaaatccccaaggcttaattcagtttccatattaggttctcatgctgctgtgaagaaatttgccagactgggtaatttataaaagaaagaggtttaattgtctgacagttctgcagggctggggaggcctcaggaaacttacaatcatggcagaagggtagcaaacatgttattcttggtggcagaaaggagaagtgcagagtgaagcgaggggaaagtcccttataaaaccatcagatcttgtgagaactcactatcatgagaacagcatggaggtaattgcccccaggattcaattacttcccactaggtccctcccatgacacatagggattatgggactacatttcaagatgagatttggtggggacacagccaaaccatatcactccgtttcacatttaatctcaagactgttattccagtgtttctcaaactttaatgccgaaagaatctccagagaatcttagtaaacgtagatttctgagttagtgtctggagtggggcctgagattctgcatttctgacagctccaaggtgaggctgagatccctgtccatggactgcatactgggtatcaaggctttggacaattctgatatgtagacttcagttttggcataaaccttttcaggtgacttttcttacagtgactacataaaagtactttcttgtacaggttgaacatccctaatcagaaaattcaaaatctgaaatgctccaaaatctgaaactttttgaacatcgacatgatgctcaaaagaaaatgctctttggagcattttagatttcagattttcggattagagatgctcagctggtaagtgtaatacaaatattctaaaatctgaaaaaatcccacatccaaaatacttctggtcctaagcattttggataagggatacttaaacctgtactgcactgaattctgccttttgtactcccaagtaatttcagttcactgatcttgtttctgcctgctagagcccccttcttcatcagtgattcctcagttaaattgtagtcgttgtccgtcagaccttcctttacaagttttcatcttttccagtaacagaatcctccctttcagccatttctcttgataaactggttattttcctcctaaacttgtttgtttttcagcacacatcctaaaatgaagtatccaggttccagcataaaagtagttactgcaaagtatagtgagattttactttacttgttctggtctgtgtacttctattactacctgatagccagcctggtggcctttcagaacacagctggtttcagttgaatgatggggtggaaaccatattgaaggcatagaggactcgttccatgttgctctggaagcaatgtgcatagctaattcttctaagacacgttgatggtaggagaagcagcttatgagatggtaacttgactcaaaagcaagttgcacatatttttcttttttaaagtaataggctttcacttgtctataggccttggatgaaagttcagtgaaggacaaatgaatgcgaagagactgaaccagcaaggaaaggaggatgtttgggagaagggaggcagtgggaccattggaacaaatagaagttacatgggaaaagacccactgtttttagaaagaagattgaagagaaggctgggtgaagctacagtgtggtatagtcactgtgcacatgcagctgatggttcctctccagtgataccagtcatgtctgtcctcaccctttgtcccccatctttgccctagtttggatcttcatctctaatctgtactgtttttatgaacatcatagtgatgttcctttctcttctcatctctgatatctgcctatctcaccactttcagagccattttcttaaaactcaacaatctttagtatttccagttactagaggataaagtccaaactccttacttagggtggcacccaaatcccccagcctgcctttctcagctgttcttcacccctccttcctgcatgggtcacactcttgtgccagtctgcacacagtctgcagcttcaaatcccctcctgtcctttcaaccctgacctttgctcgtcctggttcctcaccctgcacatctttctcattttttagaactttgcataaattccccttctttggaagaaattgtgtttgaacctccctctttaagaatgtattgctcctttttctgaacatttgttctgattgcatagtacttatatttcaatttggcactgattttaatctgccttgcattatataattttttttctttttttcctctttttcctgtgtctgtcccccttcacccaagagtgagtcttaaaggcgctattttggtgcttcacccagcatctagcactgggtgctgcaatcagtaaatgctgattgagtgaaaacaaatgtaggtaacagagaattaggatttctacatggaaaggaagagtatttccaaagtgggattcacataaagctgtattagttggaatatcactggtagtcagctatgaacaaacgttgagttactttattctcctactttttatttcttgatttttcctgatgttaagaacctgcaaagtgtttttgtgtgcattttagctatttgatttagatattatgagggcagatggttattttgatgtcaaaactgaagtgtagtactttgtaaccttactggttgccaatctgttgaattggccaaaatttaattgtgtggttttattttaattctcatttcagactatcttaacgaagatggatatatggttatcttcgtcatttgtttaacatcttagtatatgaaaggttaacatatttaatccagtaggaggattcttgctataatcactatcttaaggacccataagattaaatagttcttttggtgattcgttttccattttttaaacttacttgacaatttctataaattatgtagctttatatttattatatggtattattttagaaaaataaaacacatttctagaaaggaagaatgaaaattttgcctacaattagtagttgaaattaccaatgtcgattatgaatttttaaaaacaattttttataaaactttattttgagataattgtattgttttttacaaatccatttgaatatacagagagatggtgcatactgtttactcagtttctcccattggtaatatcttgcaaaactataatacactatcacaatcaggacatcaacatggatacaattcaccaatcttattcagcattgtggtgtaatgtagtgttgttttcagtttgaatacttagctagtaagtgaactgaacacagtccaaattatttttgtctatattgctgcaataagtacttaatgttctttttttttttctttttttttttgagacggagtcttgctctgtcgcccaggctggagagcagtggcacaatctcggctcaccacaagctccacctcccgggttcacgccattctccctgcccaccaccacgcccggctaattttttttttttgtatttgtagtagagatggggtttcaccgtgttagccaggatggtctcgatctcctgacctcatgatccacccgcctcagcctctcaaagtgctgggattacaggcgtgagccactgcacccggccataaatacttaatgttctattgaatttatttatttttaccttttcagatttaaaccattggtatatagtatatacataaattacttgagacattattaacaactaaagtgcaaaatagttctgattcattagcccgacttactgaaggacattcattgatgaaatgcaataacaaatgtttattattgttccatgaaatgaagtgtatatgcagaaagaaattaagcattgaagctatcagtgtagtttgaggggaaaatagttgtaggagaggagggattttggtgtttgtatgttgtacctgtattctatacttggacagctgtttatgaaaactaatgtacctgtttggccaccaggtgctaatgttttcagaattgcagacttagtacagggcttttgattttgatgtgtattggataaaaatgagctttcttctggaaagaaaagtctttcacaggagtttcttcaccttaaagtatctactccccttactgttacacaaattaaatggaggtgatgttatttacttaaaatcctgactttaagtacttaaaatacttaaaaaactgattttcccaaaattatatcccagtaaagtgtagataaggtttcttttctgctttgttctgggcattaagctttttcaatgttattatattacctttatggctttaatggtgcataatattctactgagtgttctattgagttaatgagcttttatttacttggtcattttcctctttttaaacatttcaatacaatcttttaactttcagcttactagttggagtattggacctacaggaagttcacaattatctaaaatagtacagaactaaaaactgtgtgactatttatagcaagacagctggttaacatttatcacactgcatacttattagtcaaatcaggaaatggctgtccacaatactctgatgatctgagttataatctcctgggctgggatcagatgttagtgcttttaaaaagccctcctataattatgatagatggtcaggttgagaactactacattcaaattaagatttgacctcatggattccttgaactgataaattgtaaatcttttagtaatgatcttcctcatccccctccctggccctcgcaatctcctaacctcaccactaagatagattcatgtatattctctggggctttctttgcgtatctgtacaacaccatacagcagcaacaacttttaaacaccatcatattcaccaaatttatatttataaacattgaaaggtaagtttgtagagtaacttcctgattgaaatttaaatatatagtaactaaaattcaaaacaaaatggtaagggaaaaataaaatgttttatcagtagtaaaatactatcctccataattatttaatagtttataatgaatgtacagtgtgaagttactttctcactttttcttaagtgatattcatgttttattgtatactgaatcattatttgaacacttatttttgtggacctaaatatattttaaaagtggatacttgccaatagactcattccttctaacaaaagtaatttttttttttcagcaagatcagcattggacacagctgcacgttgtaagtatttcatctcaatattttatgtatgatttattctgccttaggcatatgagagcttatattcaaagtgtcagtagttcagtatgaggaaaaactgctttagaaattgctttttaaagttatgaggatgctatttgattggacagcccaaatatttttggcaattattcatgatggatattttgtgttttttagctccgttattataagtacagaaattggtgtgagaaggagttaagagtgtacatgggcaaggtagtcaatggaacattaggccttttttaattatcctggaggtgacgattttttgtgcatatatggactagaagtgcaaagtaacattcagaaccccccacatcctaaaatttaaaaataaactcatagttagataaaatatatttgccctaatgcagatcatattacttgactcatttgcatccattattagtttgtttcctaggaagatctggtgtctgttgtgggtttctttgttgctgtttttttttaaaaaaattttttgaggttctttgaaaccctcaggggaaaaaattagcttgtattttaagatacgtgtatcttgatgtttttcttaatgctctttgtggtttgagatttgaagtaaagtgaggtaaagtctgttaacttgttttctaaaaaaagacatcatgttttctcccccaaagctacaaagcctcccagatataagtgtgggatctcaaaagcttgccctgagaagcattttgcttttaaaatggcaagtggagcagccaacgtggtgggacccaaaatctgcctggaagataatgtgtaagtctttgttgacttgagacgataaggtgtgctattaaattgcagccaattgaacctgagtttaatggatattttgaaaatgtgttcggtatactttattaatggaaagtgatttccatttttgttatgtagtttttttctcatgaattcaagggaccttaaagttcttaaattttatattagagagtgactaagaacgtaacacttattcggctttatagagataagagatttcctctgagtaaattctctagatctgcactgtcccatttgctagcaacagaacacatgtggctatttaattttgatccttaaatattaggaagaaagttaattcacttaaattaactaaaaagttcagttccttggtatctgtcaccgcagttcaggtgttcagtggccacatgtggttcatggtcaccaaatggaacagcagagagagcattttcatcatggcagaaatcctatttgcaacattgccctggacaatgaatgtgttctctttattttaaatgaaatccaacgtctttcatttaaaatatttgagtgctacttgttgaagtgtgaaatgatccagtgataacctcagttccattgcagcacaaactgcttgcctctaagctgaatggtttcctatgttgagatgctttctaaaggatggtttttaggatttttgatatcctacctcagtgtcaactgttgctcgcaagttcctgctgctgaaattgcaaatcctacttttagttggttgcttttaatatgctattgcctagaaaactagacatgggggcttatttaaatttaatataaaataataaatttgtcacgaattatatagaataaagagataattttatagcaaagaggagacctaggcagcttttcctagctgtttatgtgcctcttctttttaatattgaagctcttaaatttttatcgtagcctcttttgcaggcagttagctgtaagaagtttattgagcttcatgggacaacacttttcttgtaaaattaagggcttgagctagatgatcattaaggtctgtactgatttcctttattttcccgtattctaatgatgatttattgttaatccatttgtcttctgatttctcattagaatagtcctgttttactgatgcgtaataaggcacttgcattttagaagtttgtaggtttttgaaaacattctcatttccactctttatcttgtttggttaaatagaccccaaatttgattctaaatcacaggaacaaagttcttttagaatacctaacccatggatgattttggacatctattctgcccccttgatgcatgtgaattttagttcagagaagaagagatcagactgtttttactagcaggttttttattcacagattaaaaccgtaaacaagaaaacacactcagaaaaaaagctcaactgtttacccacatcctgacccttattcacttctctccagatcttcctgatcttggggccttagagtatactcttctgtctaggatggtctttcctcactcttcacttggctgtcttccttcttgacctttggttctcagagtacacatcactgtcttagaagctgttctctatccctcagcctaatgttgaacagctaaagatctaaggtcagaaagcgaacagtgcatagacagtggagcttggtaaaatacatactgggcttagagccagagaatttgcttctagcatggtgggcgtgtcatgtagcatttgtgtttcagtttctttaaccattaaatgaggcaggccacctatccatccttatttcaggaaccattctgccattaccatgagagattaaatacttggtgggattttatacccaagcctcaggttaaagtccaaagaaagagtcttaagttttctgagagtcatttattcacctgttcagcaagtatttttgagcataatccctcctgtcatggaacttacagtttagtaggggtgacagatgtttaaaaaaaatacgtacttataaattgtgacaccaggctgggcgcggtggctcatgcctgtaatcccagcactttgggaggtcgaagcgggtggatcacctgaggtcaggagtctgagaccagcctggccaacatggtgaaaccccgtctttactaaaatacaaaagttagccgggcgtggtggcacatgggcctgtaatcctagctacttgggaggctgaggcacgagaatctcttgaacccaggagatggaggttgcagtgagccaagatcgcaccactgcactgcagcctgggtgggcggcagagcgagactttgtctcaaaaaaaaaaaaaaaaaacaacaacaacaacaaaaaacgaacaaacaaattgtgataccagccctgcagggcagcagggtgtgatgagtactggcgagagtggatggaaagaggtgtctaacttttagattgagggttatggaacagtttctaagacagtgatgtgtattctgagatctgagggatagaaaggaagaccatccttggtcttcgagcaggaggaagaagcctgctcgaaggccctaagattggatagctctggagagaagtgaattagggccaggctgcataggaacttgtaggccacgcaggtaaagggttgagacttttttctgagtgtattgagaacttgtggaaggatttcaaattctggcatgtcgtgattttatttatattgaaaaaagttatctggttgctgtgtaaaataattaaggaagtggaatagagaggacaattggaaggccattgccagttactgccacagcactttcatactgcctccctattggtaacagactttattgcttatacattcactaaaatctataagtagataataaaaataacacaagcagagaatttagtcttttcacagcacctgctctgagtacatgtaactcactttggagactactaatcttggatcagtgtgtctcaatgggggcagttttgctttccagggaacattgtaattttgggttgtcatagctttggaggtactccttgtagaggccagagatgctgttaaacatctttcagtgcgtaggtcagctcatccacaagaattatcaggctcttaaaatgagaggctgggtttgagaaactctgatacagacaggtggtaattacaattaggatggtggtcataagtagttgaagtcaaaatacattatgctgataaagatgtgttttaaatgtctcattagttagaaaatcgcaggtatgaacctcaggtctcaggaaaaacagtaattgcagcttttttttttcctttactttttcttttttcttttcttttttacctagagacagggtctcattctcttgcccaggctggagtacagtgacgcaattttaggtcactgcaactttgaatgcctggactcaagcgatcttcccacctccacctcctgagtagctgggactacaggcgcataccaccacatgcagctaatttttctatttttgtggaaatggggtcccattgtgttgcccaaggtggtcttgaagtcttgggttcaagcagtcttcccacctcagcctcccaaagtgctgggattacaggttttttctttctcgttagagcacccatagaactaacttatgttccaattataattttcatctaaggcatatattcatttgatttcaatttgtatgaatttgatattaggaataattcattacttttgattttaatggtaatgtttgctgcaagaatatgagattattttgagggatttttttttaacaagggatcaatgtttttggctatgagggcaaagaggtaaaatcaaggttattatgtatgtacttacataatcatttaaaatgtaaccatttaaaaatgtaaaaactattctaagctcatgagtagtaaaacaaatcaaaaaaccagttggcaggatttggctcgtgagctatagtttgccaagccctgctttaaactaaccatcttaagagataataactaataactagaacatgaagtagctatttgaaacaaatctatatttggatatattgagtatttctacagatgatataatcatttcctttagaattttgcctagaggtgtgggaaggggtaccttatattcatgaaggataaaagaaaatatttcaacttgtgttagtaagggttactaacctttatacattttaaatctcagtggattttttatttgttagagattttctgtttgaatttcagtttttaaaaattgataagctgctgccctcttgtgggaagcctatgtcattgtgcttctttgttacctttatttctttgctttatgatagatttcagtctgtaaaatgccacatcatactccttgatgatctttacttggaaaagtcactctggcacttaacccgttaatcacagcagttacttcttaatgatggagtttacttattgaatgtatttctgaaagaaacagaacagtacattttgaaacttccttctctttgatgcagctgagccaatggttaagtagtaaagcatagaaccttttaaatgtatatgctccaagctagtacttttaaacagctttgagatataattcacatgccgtccatttcgctcatttatattatacagtcagtggtttattatattcacagatatatgcaatctctgccacagtcaattttagaaaatttttatacctcaaaaagaaaccctgtaccccttagctaatatccttctatgcctttcttgtcctgccccacttccccacccccaaaccctaagttaaccattagtttcctttctgtctttatagatttgcctattttggacagttcatataagtggtatataatatttggtcttttgtgattggcttcttaccataatgttttcaggcttcctccatgttatatcatgtatcagaacttcattccttttatgtctgaacgatattccattgtatggatataccacattttgtttactcattcattagttggtagacatttgagttgtttccactttttaactataatgagtaacatttacagaaacatttatgtacacattttatgtggacatatgttttgatttctttatactcccagggagtggattttgttttaggtggtaactctgtttaattatttgaggaactgccagatagttttccaaagtggctgcatctgtttgcatttccgccagcagtgtatgaaggttccaatttctccacatccttgccaacacttgttattatctgacttactgattatagccagcctagtagatgtgaagtgaaatctcatttgcatttccctgatgattagtggtgtctagcatgtttttgtgtgcttattggccatttgtatatcttctgtggagaaatgtctgttgaaaccctttgcccattgataaattgggttgtttctttataattgaattgtaatttctcttttgattaatgtttgcatgatatgtctctttctacccttttactttccactgcctatataattatatttaaagtgagtttcttgtagacagtgtgtagttggttcctgttttaattcactttgccaatttctgtctttatttggtatgttgaaactattttcatttattataattattaatatatgagggtttaagtctattttattatttgttttcattttctcattttcctgccttcctatgagttacataaacattttaaaaaagtgtttcttttgatttatttatagtgtttttgaatgtatctccctatagcttctttagtgctttctctctttacacaaaaagtttgcagactcaagttctagacttgaggtgagggagaaaatattacacagattaaattgaaaaatatgtcctatctatatctattatatggtggatagcaccaaaaatgtaggaagtagtcttccagtatttaaaacttattatctgattcagtcatcattgacaggcaagtggaatttgaacatgaatctccattatttgtttttctttattttatcttattaacatagatccaacgtttgttagaactgagctcattcatcaattgcaaccatagttcagctgcagatgtgaattgtttgaaaaatcaactaaaatactctgtgagaatcgactgagatttataataaagtacatcgtagattttatttatgaaattgtgtgctatacatcttttagtagtttataataaattgtgtacctatgtgtatatataattctgtctatataaggacaagtgtgtgcacgtgtagtcacatatgtgcatattgcctctctctcctaaacacagagcagttgttaaatagttaacagcacaccactgggagtattactattaccttgaagttttgagttaaaagaactcacaattttagtttaataattctaatttgagcaattgaacaaactgaactgataaccagcaaatttgtcactggtaccttccattttacagtgtcattgtctttatatagtggtctgtgagctgcccatggaagtcgattatttcaggtagtcaccacgtgagtgactgtcattcaatgcagtgatttcatgagtgcaatatttcttagtgtagacgaactttacagtgataatcactaggagaatgttcacaattaggtaaaacattcatgaaagagtgctcccccactctgtttgcttttagatttaaatgatgggggtagtatctcgcttctgtttcatgtcacgctggtattgaagagagcagaaaagagattatcttttgtttgataccttaagaatgatgcagaacatatgcttaatgtccatgttttaagaataatctgaagcagtgtagcacaaaaatggtctattatttcaggcctaatattttttaatatgtatttctatttgtgaaatattatttaaggacattgctttaaaattattcagtattagactgtcttctctgacttagtagagatctttttaatttcctccgcagcactgaacaattgaaaatatgtataatattcctaactttttttgcaagactttatttttctgatatgttattgtacaatatttaattctaaatttatttcaatttctcccccttcagtttaatgagtggtgttaagaataatgttggaagagggatcaatgttgccttggcaaatggtaagaacaattattttagcttatggatgtaatcattgggtatttttctgtcccaaagtaaaatgcactatcagaggatcaggttagaaagtactgctcttgatgataaagccctctgtcccatccctgccctgcaaaaaatctatgggtggagacttggtgtctaagaatttatagcgtgtttcttgaaagtatcctaacttgctatgcaagagcttccatgagattgtcagaaaccaagcagtctaacatcacattgataaaatcttgcttcaaattttggaatcctaacataataggaagataggttgacaggattaaaggcgtatgaaatgacaaaggatggtgtagggggaggaacaaagaataagaatgtattgtaatttttcattatcagccacattcttctgatagcttaattagtatgaataagttgattgaatcctgaacatctcaaattttccttcaaaatcaaatctgaaaacataaaaccataaagtgaggcctaactgcatattgatcctctctgttctggtacaataagtattccataaagctatgtaggatggttataagatatataggatggttagaaaccactgtagtttcatagtgtagaaaaatatattttactactttcacagcaagaggtaaatttttgttcttctgctttcttcatttccttaggtaaaaggttcaacatctgtctatttcattaatagcaaaaaatacattttatagggcaagttaatgtaagttttattgtaaaaactgatttaatgtagaaaatggcatctgattcaaggagatacttcttttttgtaaaaggtttacttttgagtaattttaaaataagagaatatggaaacaaggatgaaatatatctaaccgaattggaatggtctacagtcagtaatgaacttctatttatccttcggcttaaaagattaatgagaaagttctattaagaaattaccctttaaaaatatatttcaggtgcatatgattcagattttaagttctcaaagtaattctttgagatgaattcacatctctctaatgctaatgaattcacatcttctctgctaatgaattcacatcaatcattggatgagattattggtcttacagtgtatgatatatttcagatgcataatttgatatgaatttaatctcttttaggaaaaacaggagaagtattagacactaaatattttgacatgtggggaggaggtaagcataaataacatgactgtgttcttttgctggcactaacttaatcacctcaatacaatgtagcccattaacgagagaatgatgatgctatttgcgttagttcattttgtttcccttactttctgttcactaaatgtccagctgtatttaagttatcattcatgttttatatactttcttcttcttagaaaaaaatttttgtggtgtataattgaagatagtaatatcaaaattgagatttttttaaaaaaagtcatcttgttttctacaggacaaccaattcaaaagttttgggctcctttaagtgtgtctaaaatttaaaaaaaaaaagtaatttgaagaccagaataaccagtgtaagcattcctaagtgataggaattgatttttttttaaatgtgattttttagtctcaaaaataaatcattaggagcattaggagcattagaaagacaagataaactatcagttttagaacagcagtcctattattcatcacagttctaccctctgacttgcagctaattttttaggtagatgaatatttgagggaagaaatagaattttctttcttgtaaagcaatccacagatattttccccttccatatttggaagtcccacaaggagtgggaagaagttaccagcacgcagaggcaagggactggcaccccaaagaagaacgctgcccggaagaatgggtttttttcctccagtttgaagggaggccaacactggtttatcttttgattctttaatttgagagattgatcagtatgaggatctcccctgcacctccccattccatttatatattccctagaagccaacagctattaggcttcctgaaattcatgttaagagttctcagataatttagcttttccaacatatcttcagcttgtaataagatggtatgtagccggacgtggtggctcacgcctgtaatcccagcacttcgggaggccgaggcaggcagatcacgacgtcaggagatggagaccatcctggctaacacagcgaaaccccgtctctactaaaaatacaaaaattagccgggcatggtggcatgcacctttagttccagctactccttgggaggccgaagcaggagaatcccttgaaccggggaggcagaagttgcggtgagccgagatcttgccactgcactccagcctgggcgacagagccagactccgtctcaaaaaaacaaaagatgccgtgtattattttgttattaaataatgttaggacaacattgcatagctgtcaaagctgtataaacttaaaatgggaccatcaattttagattctaaaggcataaattggtcctgccaaaatttattgatagaaagagtcttacaaagctgttgttgaaatcagtcatgtgaccaggagctctggtattccttacttctcttgtcacaggtagattaattaccgctagcagcattcttctagttaggaaattgttgcagtttattgccacttttgcatttaaatggaagtagtttgttagctgccttgttatatctttttgaattgaaaatgctattattatgaaatataatcagttatcgaaaatctttggcatctttgctgtggaaagaaactgagtacatttgaagtaacccagttttggagtagaattagacttcagagctataaggaacccagacattgtaaagagttcaagatgtcaagtggtttgtagaatctgacctatgtatctggcatcaacagtttatagtcattgaagtggtttattttgaagtccttgtggattttgatttggtagatcaaatgagtaatgactgtaatatttgctacaattagtttggcttttagtgatcacctaacatattccttctcccagtttatagcaaatgatatacctaaaatagcctttaaatctgtgtgtatatgtatttttagattttctaaaaattacagatatctttgagaatcggagaaaagctgtgtatcctctttctagtaaagtacccatacaaacattgttatgctttttttcgtttcgtttttgtttttttgttttgtttttgagacagggtcttgctgtgtcaaccaggctagagtgcagtggtgtgatctcagctcaccgcaacctccacctcctggcctcaaagcagttctcctgcctcaacttcctgagtagctaggactacaggcatgtgccaccaagctcggctaatttttaaatttttttgttgagatgaggtctcactatattgcccaggctggtttcaagctcctgggctcaagccatcccccagccctgacctcccaaggtgctgggattacagatgtgagtcactgtgctcagcccatacaattttacatacacttaaggagtccacacacctcccatgcctccttaagcttatgcatggaccccagaataaggttttcaggatcccaattattcaaatctgagagatctctgaatttcttacttcgtaagtcatgctttactttgctatgatttttttcacttagccccaggaatatcaatacgaaagacacaggataaatcaggaatgggaaattgtaagttgatagtgggattatgttaagggacaaatttaacagtttttaaactctttatgagatttgtctgtcttttggattactttacattggaaattattgctttacagatacttcatgttttataatactactttcagagattatcgtgatgcttattcagtcattttttaaaaccctaaaccctttctttttcttcagatgtggcaccatttattgagtttctgaaggccatacaagatggaacaatagttttaatgggaacatacgatgatggagcaaccaagtatgtaaacttaaaactttacagaactttttggaactataatttgtaattataaaagcaatacattttcattaaaaaaaaaatctgtaacatagagcaaagtaatcaaactaccaggtaaacacaactaacaatttttgtttttactttgcctccttcctggttttatatgtaaatgtttatcacacatatattgtcatgaaattagaatcacatcatatgtaacattttttatacttttatgttttgttttttaacattctgaaattgtttttcctagcattaatattcttcaatagcatttttatggttcatcagcagttatgggctcacctttaaagtttccctattattatgtcattagggtaaatttcaagaaatggagttaattgtcaaagatacaggtgtgctatattttaaataattttaatatatagtagttttataactttttcttaaaatagtatatgttgtaaaaatttggaaaattatagaaaagcgcaaagagaccaagttccagtccatctcactacccagtgtaaacattgatgatattttagtttctattccagatgacttaagacacattttttggcattaaatatttagaatgctagtatttatagcatatctcttcacttacgtggtgaatatttccccttattattaaatattctttataaaaaattgtttatgcctgcctagtctggtttttaaaatgtcatgatttataacctgtttaatgggttgcctattgctggacccaggctagttccaatttgcatacttagcacaatagactatcttagaaatgtttgaacagtccatgtctatgtctttaagatagacttcttttttttaaagtggaaatgattaattaaaggatgtgcatgtttttaaaaatggattttaaaaatttttttaccaattttatatttttctcagaagttccatggcaccaattgttaatttttttaagtttcaattttaagagtttgaaaaggtatcttattttaatatgcctttattattgagattggatttttttcacaagtggtttttttttcttttgcctttttatgtaaattgtcttttgaccattcgagttggcctatcttgacttgtaagaccccttcacgttttaaggatattaaccatttctaatgtaaaaagaaatgtatttattgtacattatttgcttttaattttgttagtgtagggtgctttttgaattttagaattttagactaatgcctatatagtctatgtatttttctatcactctccttgtatacttgagaagtatttttccacctccaggttagatatttagtagattttctcttccagtgatttcactgttgtcatgtatttttaaaaacccatttgtaatttccccatgacacacaatgcctatgttcttatgtagatttggctttatctctggaatttctgttctgttccattcacttgacctgtttatctctgttccaaaaagacactatttcaattattttaaaattgttttataaaagtaattgtacttcatgcctctctggttgagattaaatcccctttaatgttcttctttctagaaaaaaataattttttctctgacttttcttcagatgacttatcaaggataaaaaacatcctttatagattttaattgacagagctttaatactacaagatttatagattttatagattttaattgacagagccttaatactacaagatttatacagaaatttgtatttttatgtattgatttttataaatgtattattttatagctacattatcacagatttacatgaaaacagtgatactttataaatggttgtaagctgaagtaatttcattgacattgtgcgttttatctggttcaactaagaatatattaaatccataaattgaaggttaacataaaactcgcctattcaagcattttcatctacctaaatagaatgaaacaggatgtaattaggctctcatcaaaaaacaggtaacttggctatttgcttttgctgagagaataggctattacgtgtaaaatttgaagttttaacattaaaaagaaaaggccccacttttctgacttgacaaacatgacctccgtttttcaccagattattttgttatacctgatgggaatcaaaattgctccccttaacctgctaatatgctaataataaattatagccacaactaagaactaggggaggaatgatgtttactcttcaactgctattttttggtgcccattaaatgcaccaaaagcagctttggaagagagttcaacctctagggcaaaaggaaaaatctaaactttaatttctttacgtttggtcacttggtcaatatatgattcatctgtgaatttaaatgaattgagttgtattagtttggggcacacgaatttatatttcaaatatttccttttcctaaataccagtaaaagaaattgtaagcatcatatcttttatactgaaatggacaacatccttaagaaaggcaatctacatctaatatatatatatcccttttatcttggcaggtgtctaattgtggcacatttgcagtgatttaccagttgtgttatataccctctcttatatatgaatagaaattctgcttactgctgctgatgtattatggcttttccttatttaaggccattgaattttacctcgttttcttccacttatactcaagaaagttaagtgcgtaaactgaatgtccctgctctttccaagagagaaagttgggtggcatgttaaccagagaaagcaggacccagctgactcactcactctctctctctcgtcgtctctgatcctagtttctcttaatcatgatgagcctgctttgcagtgctatgaacttcagcagattgactaggactgatctccatcacattatttcccagagtgtgtttggtagaacccctgtcctttacaagtacatataatggtcaaagaagtttgaggatggtaccttatattttgccccttttcgggattcacaatgaaaggctctgaagttctgccctaaagaaacgtcttttcctttgttaatcatggtgtttcttgattctgtgaagcccatttaaaaaacaagatagagaaaaacttacatctaagaaaacttaacacttcagggagtacagttatctaatgatacctactttccaccccgaccctcactaaaataagttgttctttggttataaaggagataatggtttgaatgagcaagctaaacttgccaattgtattcttccttttggagagaatactctatgacatgttatgcctacgtgaagggcttcaatatgaatgtcttggagtaagaagggatcttaaaggtcacctaaagcagcattggagcctgggcaagattctcttgttctctatgaatacctctacttaacaccctacctacttaatgtgccagtaccctttcatttctccatttgaaatagattgaaacaaaatattcacaatacagtgttacattctcagagtggtctccctctaaattctgcctgatgttctttaatttggatagatggaacaacaaaacagtaagtgtattccccaaatcatttgatacttcaggtatttgaagctaattggtatttttcttttagttttctctttttccggcttaatacacaggctcttttaactttttgtcatgtatagcttctaatttgtttcatcttcctggctatatttcttaggcattctctagttgattattgtctctcttaaaatgaatgcatcaaatcaaacacagggttccagatgtggtctggccagtacaaggtacaatgcagatgctagcctaccatgttttagagattacatttctttgaatattcatgcagactagaattgtattagttttctttaaacagtcacgttacatttttggctcgtgagtttttggtcaagttaaattctcagatctttttatttgatctcaggccttttttttttttctaaaccactgtcaaatcaggtctttctcttcattcagaacttgattttgtttaacctaaatgaaggcctttattttcatttatccttgttaaatttaattttgctgatgtaggcccacttggtcttgattctgacattcgtcctatgaagtttccatgatccaggctttgtactctcttcaaagtcatgcttatgtctaaatataagtcattgataaaaatgtttaccaagggcggtgtgccaccctgctagaggcttcctccaagggatgcatctgttaatcagctgcagaaactacttttcaaacagttgccagtgtaccctaccaggaataccatccagctgctatttcattattttattcatagaggttattttctgagactatcatatgctcacttgaaattcatggactgtgctaattgcagtaccctgatctactgcctgaaaacctcttcaaaagctgaaatagttgtgatgacgttaacttggctttacttatttccctctccttcccactagttcccctttatttccctttctttccttattgctttttaatgctcacaggatcttcttgtcatcccttcaaggattttggtaggaattcacattagttttattggaccattatttctaaaattttcttgccttttttgaaaacagggataatgtcttagcatctcccattttccatgaggcttctaaaataactgacactaccttgatgattatttcaacaagttcctttacaatctaaaagtgtgaagtgggggagggggtttacaggactggaggcttaaatttactttagagcacttacatggacttcttgagctactattccctttttatgttgatcaaagaatgtttgcctccctgtaaaagatagtcatgctttggttggatgatatatcattctcatgaaacagtgagtccctttgttattcacacttagtagcaaaagctgtttctgtggcttttaataattttatgagtttcatctcattctgagcactacaggtcttcctggttagtagtattaaaaattttgtcattagtaatgtggtttgctttgtatttttgcacacttcctttcttaagtttgagtccatcataaaacatccctatgatagcactaatttagaaactatgctccatttttttctggaagtgttagcaattatatagtgaaaattatagagtttttctgtttgtttttaaagagtcgtattccctcataaaaatttctaatctgaactttgtgtaatatgttctctttaaagtctaggctgggtcgtcatttatgccttatatagttagcatttcttactcttcaacgccctgaggtaatatggcgattttcttccagactttctccttcccagcttgttcttccctattaatcagaattgagccgttaatattgtccgtcttgctttctgtgcttccagaaaggcagcattggcttggtttgatggtgcaactgtaggactatccgatgtgcctcctttcccagcaaggattgaggcagaacccacagattcctgtgtccagttcccacttcctccctttctagtttagattgcctctgggcagcattagattgtcttctagcaaaacctgataccgttctctgtctatcctggtttatcacaggataattttctgttcattttgaagaaaattattcactaaaataatatatttgacataaatttttaactcagctagttaagaccattagtaaggattaaaatatatgtaacaaactcagagtgccctatgtggaataaaaagcttgtatctccaacctttatgctatataaaaatatatttgctgccctggcttttttaaaaaaggggcattttgacatttcctgtatattcaattaaatactggctatgttacatgattttaaacttttgaaatataaagattttttttacttagttacacagaagatatctaaaaataataataaaataatccaccaaattctacataggcagatcagaaagtgttagaagtcattgacaaagtcatcttgttataaaactgtagttagatatacacagggctatgtgttagacgtcccccaaaccactcccagttttgacagttctccagtaggtctcatggttgtgatttgttaaagcaaaaatacacaaagcaaaatgagcaaagggaaaaggttcatgggacaaagtctggagggacaaaggagtcttctcccaagtggagtcaaacaggacatgcttaattcttccagcaaccagttaggacaacacatgggaaatgttgtctgcaaggaagcttattagggactcaatgcccagagattttattaggggctggtcatgtaggcaccctctgcctaacctgttgcaaaataccagactcccagagagaaaacaagtgttcagcataaattgcattgtttttgcccacagtttagacacaatgaaccattcttatcagttttgaaaatgataggagccctccgcaaatccaagtggccagatagccaagggtcagtcttgctagtaggcctttctaagctcaggcctgctatgttaatgcatatctgcacaggatctcagtatcttctaatggaaaagcaaggaataagattaatggagttaaaacataaagctcaatctttaagtttctccttgatctctggcttgattgtaaatcagcttggtttattcatacagatcataatggtcacttctgaaattcaggagtacaaaaataagaatgcctgactgcccttcaacatatttcttagttggtgcaaaattcttggataagattttacttttggcagggagctggacctgcgtttggataaccttctattttgcagggaatttttcctgtgtaaagcaatctcttaacatttgtgaacttcacattcatcatttcagctgtttatgagccaccctaaaggcctgtgaggtatcaattcataatttttttgagatgtaaatgtgaatggaaccccaaagcctctctgcaggaggcagtccatttagctgaccactgagcctactgcctgtgctctagacatttcaatactatttattcttgttacagcagcaaaactcatcgctagtgctgatgatgcaagtgtagacttccataaggtagttagaaaatagaacatttggataaactacgcaagtggaatttgacagccttttagatccatggcatcccaataacatttggaaacaagaaaacaaggttcaggtgataattttggggcatttccctctagcaccaaagttggttatcaagtgagcaaacaagtggaaagtgatggataattcatgtaaggatgggcacaggaaatgaagctgcagaggaactgtggaaggaaagccagtgcatatgcacagatttcatgtgaaggcctcacaatcttcacagaggctgagattggttcttctgcacagtcatttcacttctttttagttcacttggctataaatgtaccacttaatataggaggcgaatctgaaaggctaaatgctccacaggctatggcttattttcttgctgattctagtgaacttcctccaggtggacagcagtgcccaggctgtggccaaaacagctccacagcccccacggatgtggtgggcatcaatcatgaaagtttaatgatatatgtagttctttcctgttttatgaagcttttttaaaaaaaaaccataagagtatccctttttctttagttaaatgagaactgttctatgtagtgtttctttcactaagatattaaaggagctacttgatactagcatgagaggtttgaaagaacactgtagaatgaataagtaccttcctcactgactttcctgctgtttggaaatataaacttgccttgcctcaggttttagcagaacaaacctctctaagtgacctgttagagctgtcttttgcgcagtatataggactcaatgccaaatatgtgtacaagtagcccttaattttttcttcttcttctttttttaagctctatagctaccatttatgttctgagtttcttttctccttagagataaaggagagaaaatcattgaccattaggatgatcacttacacaaaattttttagggacatctttcaattagtagtttccctggtggttgacttctgtcactgctccacctcctgctagtaggcatttagctgctgtgtggttaatattttcatttttattaagtaaccacttggcagttatcactgaagtacaatttatatatctgttctcaaaattcattttcttttaaataaaacatagtgttagaaacatacagatttttgtcagcatttacctttattctggtcaaatgtaatttacagagggtttagtggagattcaaaaagattaattttataaaaatattgattgcttaagaccttggatagcctggataggcatctactaactgtggtatcccttatttatttgatgagtgtaatttaaaaagttaaatgaaggtgaattgttgtgaaataaaaacctaacaggtccttttaatagaataaacttaaaattaattgttggagttcatgtcttttgtcactaaagaattcaaccagtagaaatgtaactctgaaaaaaaattattttccaaaatgttctgttatttaaagtctcattttgtctcatgttttgtgttaatatcccagtgaaccagtattagcatacagttccctctgtttattgttgtattctttctctccctcttcaagactcaatgatgaggcacggcggctcattgctgatttggggagcacatctattactaatcttggttttagagacaactgggtcttctgtggtgggaagggcattaagacaaaaagcccttttgaacaggttagtgtcatagactctcagaattaacaaaaacaaattctgtgaaaccttacggtacattttcccatcccagctatttgaaaattagataaagcggatagtaaatatgatcatatatttgtcataaattcttggtaatcagttatttgaaataactatcgtacttttaaatttcaaaacttgaaaattctgcatgggaatattttttcctacaggacaatgcattggaataggattacctatcttaagccttttcggaagctttagttattaaggattttaattgagctttggattttagaatcagtgaagtttggaaatattttagaacttagtagaatgtaaatgttagtttttgactagcaaataatcctttaaaagcacgtgcaatgtattctttcagctgttatttgaaggtctgccatgtatgtgatacagcctgagggtcactcatttaatatcttgaccagtaatttaaatgaacttattgttgacatgagtattactgaaatgagaagtgtgtaaaatgttacggcaaatcagcagtttacaacggttttttaaactgtatattattactgtgttccaatagcacataaagaacaataaggatacaaacaaatatgaaggatggcctgaagttgtagaaatggaaggatgcatcccccagaagcaagactaatggaaatgtggagagaattgaagaaagcgcactttcactcttaatgggagagctataaatggcagagctatgtgtaaatattttaagagcatgcagccatcttggtgtgtgcatgagtattgtctcttttgatatcaggattatttattgctaacgtaaatagatagcattgtaaataatcatcacaatgatcaaatcactgaaccatgtctccgcacatttccctaaaagtacaatgtttagactgctatggtaatacatattttaaattctaaaagcatacacaatgtgtaactgaatggtttgtgaaaaatatattgatatatatactagttgctgtgaaaatatcatggaataatagggattttagggtggatactttattttcttttatatttctatatgttgccttgtgatgacattatcttttaaattaaaaagagatttggctagttgtgtgtgtaatgttactttacagtccgactctcctgatgtacctcttttcatgatctttttctttccttcccaagaaactgaggaatgtttaatatgaaaacatacatcggatatgtgaaaagcacaacaaaattcttaatgtacacagtaaaaaagtaaatatataaatgtagatggcatttaggaccacagcttgctggatttgtgttagctatgggaataacttgattttgtataagctatttagagtgaggctggaggtggcagcttcacagaactggagaaccaggccaagtcccctccccaacctaattaggtcattcaggacagctaagtcagtatatttagagcaatactagcatacgtttttcttaattgttatcagcattgaccaagtggtttggaaggaggcatgctttaatatcacaataattttgatttgtaaaccaagaaattaatcctgtgtttatctaacttcataatagcaattattgcccgaagctatagtggcatatttacaaaagttcttattactgggcggactgataacatttaaaaaataattgtgtttgaccccaaatgactttatacccaattctacataaaaatatagaagatctatctttttttgttaccttcagatgttcactaaataactcagtttttaagcagaagttttcagggcattaaatatatgttgtgtatgaagtatctcaaactggaacataaatttagtgatcaaactgccattcacagtgtaaggcagcacttaaatttcgaacctaaagtttagatgcattgtataaaaaaacctaaaagcagtatctgttatttagctgtaaaccaagttggaagctattcggataatttcttaaatattgatgaactttggagtactgtttcttccttcaaactgaatgtaattaattcatgaataaatgcaccttatatgtttaaacaatctttgtatacttttgggatttttggtgcttatatgctaaatcacattcagcatgtgtattttgacatttaaaatacttccctcaattctgtaaattaaaagaatagttattttacagttccagggattgtgaaataaatgttgcagttttttaaaataatgaaaataaatactcttggttttgctttgtgaattttttttttttttgtattatctggcaaagtaatatacctacagaacttcacaaaaactcacacaaggtttttcaagcatttattatactgcctaacttggaaaaaaaattgttgctgtggttaaaaatagtaatatcctagatgtatcttaacatgtaagaagctaagtatctagatggcggaaaaagcccttttattaagactgtaaaaggatagcttttccagatatataaaatgttaaaagaagacaaagattggttatgttaactggtgtggtttccttttgtctcagttcaatcttgtatagattgtgccaacttaactttgaaagcaataactttatactacattttcagatacctctttaaaatcggttttagacatgaaacagtgctcatttaatattaagaatgttctttattaaaatcaaattaacattgacatagtatttgaaatggtgcttatgggcttatcgatgcatattttttatttgtaatccgatgctgtcccagaataagtgtattgtaatatgaatgttaaaattgaacaagagaaagcaggaaaataagtggtatttgggaaattaaaggaagattgaaccagagtctttatattcctgaatttaattggattaatgggaaatttatcattgttctttctatattggacttgtttttaagtgaatcagctatgttataattttatgacagatcaaagctgagttcatttagcctgttgcactttatactttaaaaatttacataaattttaaataacttgaccaaaaaagttataatttcattcagtttggtcaacaaactctcccttaattgaatgcaaaatgtgccatgttcagttagtagagcaattaaaagtggaaattcatttagaatactttgtttcaaaggaatatgagagagataaattacttgtgttgattagggagatttgtcacttaaacctcttcaattatttcaacctcttgtacagcaataaatccatgtaaatttagagctatagaataaaataacagattgcacctttgcattcctcaaaaggattttctgtctcttttcagaatgatttttctaccacatacttgatttttgattatcacatgctgtaactagttaatttctatttccatccaaactcgctcaatttaagccttttttctctgcttgctccttattgtgattttttttttttttttttttttttgagtttccaggcaaatcaaaggctagatggagtgaaaagtaagcaggcttcgcgagggaatgtcattcatttgttgctagacagcatgaagagagcatcaaaggatgtttcaggcagcatgggaaaagccctccagggaatctaagagactcttctgccatcagaaccttcctccaggccagtgagggggcaaacaccttgagggaagctatactggggaaacacttcaaatagttagatgtctcttctatgagcggtcagaaaggaaaagggactgggaagttctcaggttaaagacagaagagatgtttctcttgggcttgtcccatggcaatttataagcaaagttagcatggggaagacaatcttctcagtacaactagttcacaggtacaacttgttgccatcactaacttcactgttcagctctgcatcagttatgacaaccactggggtgcatttaatattgaaagaacaagctgaggctaaattgataaaagatactccctttggtcagggaaaattgacttataacctgcaagctcgtaatgttccgtatagtcagcccatatttccttcacttgatagccaaagagaaaagggtctgaaaaacctttaaagaggagagaattctgtagtggggagacagtgtggcatagtggttaagagtgcagacttgcctgaaaattcatctctgttccactgtgaactacttgaggactttgaggaagtcaatgtccacctgtaaaacagggataataccagcatgtttgtggtgcctatcaaagtgcctggcacaaagtactcattcagtgcaactgctagtattgctgttatcaaccgtgtgtcttacaggcattttagcccaagagaagctgcaacaagtcagcctctctagctttccaatcccatcatacccagccagaagggagccattagatgacttgagcagtaagatcatgggagaggtttcattcatttcttcacctgaggttctccttgacctccaaacctctttcatattctgcctaccttttcacttattacacattgacaccaactccccttcataggtagaattcaggcttttatgtatctccaagtagctaccattttaagtggttaatttatgtattttggtgtatcttcaggtagctagcattttaagtggttctacttgattgctggtctggcctttaggggaaagtatgtgacttaagccaaagaggctgggagcccttgctgacctcttcctgtggcaggaggtggttgatgagcctcactggagagtgcaggccttgatccctgctcctaataacctcaccactccaattcctgctgcggggcagggtggcatactgatcatggtggggaagatgctggggctcagctggccctctctgacacagaacaaactcaacagtgaggccagtgacttccccaccaaattgtagcctcctgtatcaccagtggaataagatggccgatttggacatctacctgttgaaaagaattgctctgttttccataagtatatccctcaaagcagaggagactaatggtcacccttgggaatcttgtcttttagcgaaaagtccagtgtgagcctgtgaagttctctgattgtaaaacttcacatgaattttgcatttttttattatttacagatgttggtattaacatggaaatctcttaaattattttaaatttcaactccaaaagctacttagcttgtgtatgctctgttttttggaaggctggttacagaagtattatgtgctctatttggcaagaacagaaaggaatcccaaggagtatgcattgtgagtccaagctctgagaagaggagagatttaaaagcaaatgatggttgggctatggttagaaatatgttgggttagtggagaaggcagtattccctgagagttgtggttttcagtgggtagaagtgggagagtcaattggtgaagatttccttaggtgtaaggaatgagcaagaactgggccttatgtcctgcctccttcttacctggggagtgcagcctgccccaaatggcttcctgttctcccttagggaaaggacttaaggtttaaggtaagtgagctcattcctagacctctatggaaatctgaaacgtttgaccaaaaatgatattgacagctaattcttgtggaactgttaagaccttacaaaagggtgttaaaattatattatggaaatagtctggattaggttccctgtggttttaaagcactggatgtgttggatatgggcacagttacaggaattgtggcaagtgaaattttgaaatcattcttgtattttaaagtatagtttctcaaaaaatgatgaattgggcatttggggaaagcaaaacaactttaagccggtgaaggaaataatttctcacactgagaattgaaatttatctttcagtttgcaaagttcctgtacccattaagtaggggacatgttagagaggatttatcccattcacttcttcagctttcccattttgctattgtgtcctgtgttatttcttgccttgcatagagccttgtttgccagggaatttgagataaaacaatgacagtggataggactaagagaaagtaaggattatgtactggcaatacataggtagttattgatttccattttgtgtatctacacctttcgttggtttccagagaattcgaggtgtatttaaatgtactggtatatttggtgatatttctctcaccaaagagtgagtaggggcaccaaggatctgccctttcttcttggctaaacagggccaagtaaatgtgtgggccatgatcatgggtgtcaggtggttactaaaatgtggaaggaaaggcttggcctctgcagtagagctaccctgatggttctgaatggccatctgatagggacaaaggcagccctcagccaccgccctttctgcctttccaattcacatgaatcagatgcttttacttactctgcaaattataaagtcacacatgaaactttagtttgtgttgacttgattctcctttattactttacaaccacatgggagaggctgcttttgctagtatgattttgtttcaaaaagttttaatctggtgcaaaccacctctagtggttttcctttggatatgagtgtaaaccattacaaatagtaaattttaatccatctgttaaaaataacaccttatgtaacatttggctgtaagcacaacaataaaaaggatgtaagtatttattttatgtcacactaaattagtttgatctttacccctagttattttcttttggaatggttattagattcttgcacaatccaactgtaagccacattgcaatctaaaatagaagtcagcgtaagtcactttgggcttagtaatcaagaggcagtgtattttaattttatttcatagtaaattctaagatctcagctctcccatcacttcgctccctacttttcaaccaagtttatataaccaaaccatgaagaacatcctgtaactttcattacattcacaaatcccctaaattctttaaatggcatatgtttgtaaacacagtctgacaattctgatactgtgagaagcacaataacaatgtggtagttaagggcacagacattgaagccagttccttctgtgtgaccttgggctgggaacttactgtgtgtctcagtttcctcagctgtaaaacgaaaactacaataatgtacctactttacgaggttgttgtgaagattgaatttttatatgtatctctctatatattttttacttagactaatacgggtatatactaagtgctatggaggtatttgctaatattatttattctttcaaagtaaattagtcctttccttgtgtatcactgtgtcccttgtcatgctgtgccacgtgtcatcatcttgcccccaagaaatgtcatgatttatcacatctggtctatagtaaaatttaaattaatttcaaaaaggagacatcttagccaactttctttaagaaaggcttgtcttgaggagtatttgaggtttctgaagataggattcaaatttttcttccctcaaatcacctaaggtaatcagtgttccagatcacttcctgcctctaaatagtgagtcgaatttctcaatctttgatgacctttgggaggtgatgcaaaaaggatgagcaactcactaaattgcctagaaataagtattttgatgagacgcttttctgtttctactacgtatttaaacttagtacaaataaacttagtacaaatatttaaactaagtacaaatatcatattagtactaacagtcctggagaaaattaaaatgtgttttaaaatacttactgtgcatatcacatagttttaaagctgccaaaacataaggtcacagcatctaatgtgtaaaattaaaattttgttgttatttttaatataattatcatagtctcttaaaatagaaaacaaaatgactatcatccgaattgtgaataaagaaataatgcagttgtttatactaaaaagaattaacatgttgttaatgttgtgtaaagtaccattatcaggaaaatgccttaattattcaacttcctaatccagatgttacagataatatcatttaatatgtttttcttgactttgtttcaggatgaatcattgcctcttaccattgcctttattaggcagttccaaatttacaaagaatttgaactcctaaattgaaaaataatccactggagcacctcccttcgccctttaacattatgcaaggtatttaaacaaatcaaagcactttgaacccacattcataatccacagtgcttagggcttgctttgtctgttgtgagctccatgtaatatcaaaagctgtttcctaaacagctcactagaactaaggcatataatgtctttgctgcccagcgtccaggtactccttaccagtaacataacaccctggttttcctttagggaaaccacccccgtctctgttctcacgctgtgtaattttagttccagggaatcccacttccacttccagggtcatgatggccttaagatggttcaatgtacctatggctcacccaaaactcccaatggtcatggtgattttttcagagagaggcacatttaatcaattagaaccactgagactcagaagacctttgctgaatcctctgagaaagaaaaggttttctttccatctgtgtgagcaaaccaggagagaacctctctttcttgaggatgggacccctctttccttagaatgagtggcaggtaggagaatgtgaggtctggaagcatggcagccatgttgctaagaaaagtagagatcccagagatgctaggggtgggagactttgaaagaggttaggacacagcactgcatgaaccctgaagtagaagacttggccagtagccagcctaaagtaatagagagacctgagcccagggaacatggtgtgagcttgtggatcaagcttcccctgaaccagtcacaagtttgaagtttttagttactgagtcaacatatttaatgtttaaatcagtctgggttgagttttccattacttgcaacataaggggccctaatgaatgcaggcaatgtggtttagactagataggagcctttgggtcccagaattgtgttcccaggagcaccatggtgcttcctctaccatgactgggagtgggatggaaatgggctaagggcaggctgtcagccaataagagagatagataggtgatggccaggcgcggtagctcacacctgtaatcccaacactttgggaggccgaggtgggtggatcacttgaggtcaagagtttgagaccagcctggccaacatggtgaaactccgtctctaccaaaaatacaaaaattagctagtcatggtggcacatgcctgtaatcccagctacttgggaggctgaagcgggagaatcatttgaacccagaaggcagatgttgcagtgagccgagatcgggtcactgcactccagcctgggcaacagagtgagactgtcttaaaaaaaaaaaaaaaaagtgagaaacttaaggatggcttccatggtgataccaaaggtgagaagaaaagaagaacccaaagacacaggtttggagttaggaggagtttttgcttaggcatcccagagagaggtgcctgagttagcatcactgttttaaaggaatggctgaacagtaatcaagtctttgtaaattagaggctgcctgattctcacagtcagttgataaggtaattatgaaaggttttctaattaatagaagaaattggttgttaatagacactacagtctttctgttttttaaaaatgggtgattatgttcaaagaagacaaaatagatttactttgaaaaaaataggcaggagagagtgtatattttcagattattctgttcaagggatgctaaagactggaaaaccacttttaaatatgcactatattcatatatttgccatttctgtgtctctcatttagtaaataataactttgtcaaactttacaatcacagttaaatgcttagtcttgattttaatattagatctgagacattttccatgggtttgctctttttcaaaaattgtttctctgcctcagtgaataaaattaaagagaaatagaatgaagactgtggggcagggaaacatttctttatcttattaataagaaaatgaatattctctttgtccattctgaattttaaaaatctatttttttctatataatactgaaatatttaacaattcataaaaaacataagcatttacattaaaatacatccttaaatagagccctgtaatttttaccaggaaccttgtaaaatatgatgaatatacatgcatgaatattaaaaacaagaaagaccacttaacattcaaatagaaatgcagcattacataaaatataataaatatccaggatatcaaatccacaaattgatcactattctgatttagattcttttttccagttaagacttttactaatataatttattataataaccttatgagttaagcataactaatgtgaaaagagaattcaattaatcttactgctgaaataacacaaatttttgatattttgcaacatattttaatctataacatataaaactgtcattttagcaagaaatacacatccatataactaactgctaagttaaattctcttcgatgtccaaaaaaatagcattaatagtatgaaaaaaaataagctaatattatttatgagataattttactgccttagctcttaggctttgtcaataaatgttttaatataaatcatataacttaagtactgtatttacaaaatagaaactttttaaacaaaattctttacaaaacactgtctttacacatttaaagggtgcttttctttacaatgtatgaaattatatttttacctccactgtttacctctccttttcccgcatgtttcaggatcctccccccagtatctcagaggtgggtttttaacagttgaaactgatctgtgataaaagtatgaatctaaagatcaaagattgctatataccttatggaggtttttccagattctcccagtgaaaaggcacttaaaatctaaatcattcattatactttttacatattgattctttgtcactaaacatctgtaatgatcatttttttagggatattatatcacttaagaagattctttttgattacctttctttggaagtacatgaaagggtaagtcagcacccaatgcttatgttaacttttcaacatcttctatccacacacaaacagtataatttcttcagttaaaatactgagagaataaatgagattcatgttaatgtctccttattgctataagaggtgtcttttaaaaatgactaatgttcacccaccattattgagtcctgtaactaagttccatattcaaggatcttatcctgagtatggcaggcctcctggcataagggatctttcctgttatttcttgcttaggaaacagattatcttccttgtatgtcaatatatattccccaaatcatcaaaaggtgaatataaaccttttcaacattagaatcccaagaaatccacatgattgatgggttgatcagataaaggaaaatatgtcgatcaggtaagggaaactctcaggtccaaggttctagggattccactgcaagagtcaactttactagcgctgcacagggatgggcacctctctggttgcaatgccattgtatattgctgaggcatcttgcccaaggctggatggagtggttacttgcaagtgtggacatcagtcatgctttcacacctcctgcaacggacatagcagcaccagatgaacttacactcacacctctccacgtgcctgaccacatgggtgttgtaacctcggccacagcagaggaggttgcagccatctgcaccctctgatgtacggttgcattctctgccttgtgtccctgggattcccagtttcttatcttctacacagtagttgggagacttattaacatagagcagatcatccttatggattggtattttcctctgatctttttctctcctgcgcattttcctctttgttttgtctgatatctggatactgttttcatatttatccttcaacaaatggccaatcttttcaaaagaagacatggttttccagcatgttttcacagcacaggagccggaaactccgtggcagcggcagtctactgacatcaacttggcgacagcctgaaaccaacagtaattgtgttcaactatcaatcataaagtgttttactcaacaacagaagcacagttaatctaatcaattaactttctgggtctatttcctcttgaataaaaatgatggttttgaacgtaaataatctttaaaattgcgtaggcttcaaatgtttcgtcctttggtttttgtcccaaatgttttgtccaaatttcttgacccttcagagcaaagctttccaagctgtacttaaagtagtggaccagactaatattattggagattatctgcgataacaaaaggaaattacttctatttctaatccccggtctaattttgaatgtggtaggatgcttatgcat

SEQ ID NO: 3365 - DNA, 2111 bp, Homo sapiens
aggcccagcggcgagctggctttctcctggccacttgccggggtgaggggcagccggaggagtccgagaggaagcggaggcgcgagctggaggcggcggctcccgtcggcctccggcaggactgagcgctgggaggccggaaggcgggcgcgcgcggcggagaggcgggcgggaggccggagcatattaatgaaaagtgccataaactgaaaaaccaaacatgagggtagcaggtgctgcaaagttggtggtagctgtggcagtgtttttactgacattttatgttatttctcaagtatttgaaataaaaatggatgcaagtttaggaaatctatttgcaagatcagcattggacacagctgcacgttctacaaagcctcccagatataagtgtgggatctcaaaagcttgccctgagaagcattttgcttttaaaatggcaagtggagcagccaacgtggtgggacccaaaatctgcctggaagataatgttttaatgagtggtgttaagaataatgttggaagagggatcaatgttgccttggcaaatggaaaaacaggagaagtattagacactaaatattttgacatgtggggaggagatgtggcaccatttattgagtttctgaaggccatacaagatggaacaatagttttaatgggaacatacgatgatggagcaaccaaactcaatgatgaggcacggcggctcattgctgatttggggagcacatctattactaatcttggttttagagacaactgggtcttctgtggtgggaagggcattaagacaaaaagcccttttgaacagcacataaagaacaataaggatacaaacaaatatgaaggatggcctgaagttgtagaaatggaaggatgcatcccccagaagcaagactaatggaaatgtggagagaattgaagaaagcgcactttcactcttaatgggagagctataaatggcagagctatgtgtaaatattttaagagcatgcagccatcttggtgtgtgcatgagtattgtctcttttgatatcaggattatttattgctaacgtaaatagatagcattgtaaataatcatcacaatgatcaaatcactgaaccatgtctccgcacatttccctaaaagtacaatgtttagactgctatggtaatacatattttaaattcttaatgtacacagtaaaaaactatgggaataacttgattttgtataagctatttagagtgaggctggaggtggcagcttcacagaactggagaaccaggccaagtcccctccccaacctaattaggtcattcaggacagctaagtcagtatatttagagcaatactagcatacgtttttcttaattgttatcagcattgaccaagtggtttggaaggaggcatgctttaatatcacaataattttgatttgtaaaccaagaaattaatcctgtgtttatctaacttcataatagcaattattgcccgaagctatagtggcatatttacaaaagttcttattactgggcggactgataacatttaaaaaataattgtgtttgaccccaaatgactttatacccaattctacataaaaatatagaagatctatctttttttgttaccttcagatgttcactaaataactcagtttttaagcagaagttttcagggcattaaatatatgttgtgtatgaagtatctcaaactggaacataaatttagtgatcaaactgccattcacagtgtaaggcagcacttaaatttcgaacctaaagtttagatgcattgtataaaaaaacctaaaagcagtatctgttatttagctgtaaaccaagttggaagctattcggataatttcttaaatattgatgaactttggagtactgtttcttccttcaaactgaatgtaattaattcatgaataaatgcaccttatatgtttaaacaatctttgtatacttttgggatttttggtgcttatatgctaaatcacattcagcatgtgtattttgacatttaaaatacttccctcaattctgtaaattaaaagaatagttattttacagttccagggattgtgaaataaatgttgcagttttttaaaataatgaaa

SEQ ID NO: 3366 - protein, 225 aa, Homo sapiens
MRVAGAAKLVVAVAVFLLTFYVISQVFEIKMDASLGNLFARSALDTAARSTKPPRYKCGISKACPEKHFAFKMASGAANVVGPKICLEDNVLMSGVKNNVGRGINVANGKTGEVLDTKYFDMWGGDVAPFIEFLKAIQDGTIVLMGTYDDGATKLNDEARRLIADLGSTSITNLGFRDNWVFCGGKGIKTKSPFEQHIKNNKDTNKYEGWPEVVEMEGCIPQKQD

SEQ ID NO: 3367 - DNA, 2843 bp, Homo sapiens
aggcccagcggcgagctggctttctcctggccacttgccggggtgaggggcagccggaggagtccgagaggaagcggaggcgcgagctggaggcggcggctcccgtcggcctccggcaggactgagcgctgggaggccggaaggcgggcgcgcgcggcggagaggcgggcgggaggccggagcatattaatgaaaagtgccataaactgaaaaaccaaacatgagggtagcaggtgctgcaaagttggtggtagctgtggcagtgtttttactgacattttatgttatttctcaagtatttgaaataaaaatggatgcaagtttaggaaatctatttgcaagatcagcattggacacagctgcacgttctacaaagcctcccagatataagtgtgggatctcaaaagcttgccctgagaagcattttgcttttaaaatggcaagtggagcagccaacgtggtgggacccaaaatctgcctggaagataatgttttaatgagtggtgttaagaataatgttggaagagggatcaatgttgccttggcaaatggaaaaacaggagaagtattagacactaaatattttgacatgtggggaggagatgtggcaccatttattgagtttctgaaggccatacaagatggaacaatagttttaatgggaacatacgatgatggagcaaccaaactcaatgatgaggcacggcggctcattgctgatttggggagcacatctattactaatcttggttttagagacaactgggtcttctgtggtgggaagggcattaagacaaaaagcccttttgaacagcacataaagaacaataaggatacaaacaaatatgaaggatggcctgaagttgtagaaatggaaggatgcatcccccagaagcaagactaatggaaatgtggagagaattgaagaaagcgcactttcactcttaatgggagagctataaatggcagagctatgtgtaaatattttaagagcatgcagccatcttggtgtgtgcatgagtattgtctcttttgatatcaggattatttattgctaacgtaaatagatagcattgtaaataatcatcacaatgatcaaatcactgaaccatgtctccgcacatttccctaaaagtacaatgtttagactgctatggtaatacatattttaaattctaaaagcatacacaatgtgtaactgaatggtttgtgaaaaatatattgatatatatactagttgctgtgaaaatatcatggaataatagggattttagggtggatactttattttcttttatatttctatatgttgccttgtgatgacattatcttttaaattaaaaagagatttggctagttgtgtgtgtaatgttactttacagtccgactctcctgatgtacctcttttcatgatctttttctttccttcccaagaaactgaggaatgtttaatatgaaaacatacatcggatatgtgaaaagcacaacaaaattcttaatgtacacagtaaaaaagtaaatatataaatgtagatggcatttaggaccacagcttgctggatttgtgttagctatgggaataacttgattttgtataagctatttagagtgaggctggaggtggcagcttcacagaactggagaaccaggccaagtcccctccccaacctaattaggtcattcaggacagctaagtcagtatatttagagcaatactagcatacgtttttcttaattgttatcagcattgaccaagtggtttggaaggaggcatgctttaatatcacaataattttgatttgtaaaccaagaaattaatcctgtgtttatctaacttcataatagcaattattgcccgaagctatagtggcatatttacaaaagttcttattactgggcggactgataacatttaaaaaataattgtgtttgaccccaaatgactttatacccaattctacataaaaatatagaagatctatctttttttgttaccttcagatgttcactaaataactcagtttttaagcagaagttttcagggcattaaatatatgttgtgtatgaagtatctcaaactggaacataaatttagtgatcaaactgccattcacagtgtaaggcagcacttaaatttcgaacctaaagtttagatgcattgtataaaaaaacctaaaagcagtatctgttatttagctgtaaaccaagttggaagctattcggataatttcttaaatattgatgaactttggagtactgtttcttccttcaaactgaatgtaattaattcatgaataaatgcaccttatatgtttaaacaatctttgtatacttttgggatttttggtgcttatatgctaaatcacattcagcatgtgtattttgacatttaaaatacttccctcaattctgtaaattaaaagaatagttattttacagttccagggattgtgaaataaatgttgcagttttttaaaataatgaaaataaatactcttggttttgctttgtgaattttttttttttttgtattatctggcaaagtaatatacctacagaacttcacaaaaactcacacaaggtttttcaagcatttattatactgcctaacttggaaaaaaaattgttgctgtggttaaaaatagtaatatcctagatgtatcttaacatgtaagaagctaagtatctagatggcggaaaaagcccttttattaagactgtaaaaggatagcttttccagatatataaaatgttaaaagaagacaaagattggttatgttaactggtgtggtttccttttgtctcagttcaatcttgtatagattgtgccaacttaactttga

SEQ ID NO: 3368 - protein, 225 aa, Homo sapiens; identical to SEQ ID NO: 3366

SEQ ID NO: 3369 - DNA, 34129 bp, Mus musculus
  misc_feature (1)...(34129): n = A, C, G, or T/U
agtcacagcaacttcactctcaatagccaaaagggtgggatgactcctctattgacagacgaacatgtggacaaagcgtgatgtacacacacagtgttgaccctcaaagtagtgttgacacatactacacacatggctgaaaccaggggacgtggtgccaagtgaaatgtcacttataagtaatactattcattgaatcccaataaaaagctgaaatgttcctttggtaaggatatagaaagctgctttttttttcttttaatttgtgtatgagtgtccatatctctgtctctggagcgtgtatgtgtacatatgggtgtacttgtcctgagaggagcatgcagaggccccactttgtgggggtcggttctctccatgtgctctgtggattctaaggattaaattcaggttattcggtttggagtcaagtacctttgccttgacttaatgttcccagcacactacttttaaatattgttggttgaattataaattggctcaatcatttttggaagacagaattgcagtcatcgtagtttaaatgcatatagttctagcaattaatcttccaggatttacttcatagatatattaaaaagtgtgctaagaaaaaaaaaaaggaaaaagaaatgtcacttataaaaagattttgagtccgtgaatatgaagtcccaaaaagagtacataaaacaaaaaaatagtttccaggggccagagagaagagaggagggaggcctgagcaggagataatgggctttgttttgcaggagagaaagagttgtggtttagacaaatgagtgtgcttaactacattctgagaagggaagagatgggacactgaaatcagcggtgcatgtctgtgatgtcagggcttagcagcccgtgtgggagttttgaggtcatctgggctaaataatgagactctggaagaagaataaggaacaaggttgagagacaaagacagaagaggaggaggaagaggagaggagtgggagggagaggagaaggggggggaggaggaggaagaaaagatgatgaggaggacaggatgaagacaaagaggttaagctggtaaattttgtgtacttgaacacacagagggaaagtaatacattaagctacaaggagtaaatctgaaatgaaacggggcagagtgtggtgcctggtggagcgccaagcagctttaaatcaggagggaggctgggtttaaatcaggagggaggctgggtagctttagaagggaggcctgaggaaggcctgagagggcttgtttatctcctggcagccatggtgatcttaatctaagactaaatcttccagggcccgtgggcgtgggcgtgggcgtgggcgcgggcgctgtggcaaagagcagacaacgttcaggcagtgtcactgggaggttgctgaggttgaagctggggttggccacttttcaacttggttagaaagacaatccaggcgctcaggtggcacctgcactggctttaatgagatgtcacctgagaccacaggtcaggtgactgcaatgataaatgcttgtgaccctttctaaagttgaactggagcctagaagcaaaaaaaaaaaaaaaaaaaaaaaaaacaaaaacaaaacaaaaaaaaaaacccagaggtgtgatttttctttgtttctttctttttatcttggtttttcaggttgttattgagcctggggaggcttggcttcctgggagctgagaaaacattcattttcagtatgaattgtaagtccctcataaccttgggatttgcaaagcttcgtctgaccttctatcaccatctaagtaaggagggagctcagatagtcttatttcaggtactctttacctgatatatcatgtgacatggaacgaggagccgcctagaaaactctgtgacctggttgtgttttatggtgaacttaggagaccagtgtaaatggtatcaacttaccactgtttaagacaacactttgtacttatgacgaaattaggaagagaccggcaccctttctttgcagtcttcaactgattcccacaactcagttttgatatcacttttctagatgtgataagaaaatggtaggctcagcttgaatctctgctctgcaatcaggaagatttccgggccaccacattctgaccctgaggaggaggttcacacgaggggcggccaatgactttgcctctcccacaatcctgctctctagacagggtgtctgaaactgcactgcagggatggggaggggtagaaacaggctctttcagcatgtgtcctttccacactatgacggtcatagttgaaaaatatattccaccaaccttgaaaatggtccctactccagtttttggtaaccagtctacctaatgtttgacttcctttagtttataaacaaaattctttcctctcttcctctcaccttcaacctgttccttcctcccttcccctttccttcccttcccttcccttcccttcccttccctttccttttcttttcttttcttttcttttctttttttttttttttttttttttnnnnnnnnnnnnnnnnnnnncccttcccttcccttcccttcccttcccttcctttcctccttcccttctcttcctctctctctctctctctctctctctctctctctctctctcttccttttactttttattggttctttatgaatgtcacatcctgcatcccgatcccattcatctccccatcccctcttctctccaccctttcaacctccctcacaacagaggcataaacatttcctgtggaagctatagggtgtcacagtatatcccacacttttgccttttgcccacacttctttgcttgcaaatgttcattgcgatgagtctggtataaggcctctggcttctgctactttatcactgctggaagctcactgggactccacttggataccctgttgctgccctgtgtcatggagattccataggtttgaatctgtaggaccagcctctttatggattccagcagttccttgatggggtgggtgttggggtggggccaattcaaagccgtggatctgggcatgagaggtatctaagctggctagcctgtaggctctcctgctcttatgcccttagggctggctcaccagcaacccccacagccagagccagctcaaccctgctgcccaggtgaggtacagggcctgctctcccaagtgctagcactggtgaggggccgagccagttctcttgctctcatgatcccagggtcaagtctctcgcccgccacagatggtgatgggtgaaggtggaggagatctctccttcatccatgctatcacaccagagatgagtggtagggccagctctcccatgctcatatccttggggctagctcacctgcaacactcaaaatgtgtgggatctctcaggagcagtctcaggagtattatgccttggtcatacattagggcaccagtcaggggtcatcctgggcatgaatgatctgctccctcaagcctgtgtgaccagacagatggtcatttcaggccattttcctgtctgggccccgtggagtgagtctggtggtcgtctcgggcttgctcctcactggctgcccgagtggctgcttgtgagagttgtcccagcttactcccaactgaggctgaaggtgcgctaaaggtccaaggtgggttcttctagtctccagcttgctctccatcttgggtgcccattcagacctgcctggaacgggattgtttgtcgtctcaggcttgctttttttttttttttttcagggaatgttaggttactaatcattcggacgttcctacatcagaacagtgaatataatgtagactttctcctctctgccacctcctgacacacacgtgacacattagccacgtctgcaatgcctctcgtggcaggcctctttttatttcttatacaggggattgaacctgaggctttatgcacactaagtatatgctttacacagatccacatccctatcactggacaagattcttggtgcatgctttccaacctaggtgctttcacagtaaagaaagaaaaggggtattttcttcatctttgtgcataccccactgtgcacaatcatctctccctggttattgagcccagaaaacttccagtacctctggtttctctcagcagacaatgctgggaatagagccagttgtcttaccccagggtcaaatgatcccatgcaaatgtagcaacttcttactctgatagatctctatcagtgggaaagcaggatttagtagccattctgggcggatatgtgtgtgtgcttgtcagtttgacaggagttaggatcatcagggagaaaggagcctcggttgagcaactgcccctgtgagatccagccgtaaggcattttctcaactagtgatcaatgtgggagggccccgacccattgtgagtggtgccatctctgggttggtggtcctgggtcccgggttataagaaagcaggctgagcaagccaggaggatcaagccttacagtggtacccctccatggcctctgcatcagctcctgcctccaggagcctgccctgtttgagttcctgtcctcactgcctttggtgatgaacggcaatgtggaaagtgtaagctgaataaaccctttcctcccagaattgctttttggccctagtattccattgcagcaatagaaaccctaactaagaaaggagcgaaagagtaaaagtccagtgaattcagcagacactctgggttctcactggagaggaaaaagaatttaatcccatgtaacacagtatttatctctaagaaatcacagcctcatgtgggtgtagaagaaacacccagataagtacagaacaagactgtgtctgaatgggacatcaaactaaaagaaatgcaggctatttgctgaggctcgaggtgttgctttggcttcatgctttggagaacatggcgagctagcgtcagagaggtgccttcagagatggataaaattcacaaatatggagaaagtcacacccagtaaagagattggcttagacgaagaccccaaaaaggaagccccagttgagcatctacttaaaagatgtgaccactcagatttgtttgtcaaaataaaaatctagaaacaaaccgtttattcacaagacggtggtcaaaggaattgtggtatacttagccaatgagaagtggtcatatgggaaaataagtcaaatagagattataaaatgattaatggaaaaataaacaatattaaatgacagaaggaggctgcagaacaagtgagaataacataagggttaaaatatactacaggatataatatttgtggatgtgtaatttcgcaacattttgatatcattaatgttaatacttatccataatttcgtaatgtcttcaagagaaaacagtggtcgatgaacaaccaattcagtacatagcaactgttgctggggaggaaaagaggttcctgctgaatccatcttaccgggagattggtgactaaaagaaaggtgcacacatctacactcatgcatgtatttaaaatctgaggtaaatacaacactctaagatttgacaaacccttgtttattgtctatacacttgaactatttaataattctaaaatgaggtgcatggacattggtggcacccacctggagtcgcagtacttggaaaatcagaagttcaagtaagagaaagtcaccgagcattgggtacagcagatgatgtccgaatgtcccttggagcccagtatgccatggtaggaaggcagccatgagttcaaaattcaagaacaacttgtcttacttagtagctacaggctatcctaggatatgatggggaccttgcatctcacacacacacacacacacacacacactggaggatggaatagatagtcacagagagagtcagatacagagagatagacacagagacagaaatctatggcctctggtgcgctgttctgtttactctctttgctgacttcagagaaggatgagtcccacagatgtaaaccaagtttgggtcatggaaatgctttgactgccaaggtcaggaatgtgagctttcattggcagttggaaagttggaagttaccagaagctttggagccgccagcccccgccccccactttttttttttttttttagctgagttttagccaatcaaataagatagaattcaggccaagaacagtcaggaaactgtcaccatcggtgctgctggcgcaggatgcaggtctgtagacataaactaaacagcagcaggtttatgactatggtcatcctacccagaacatactttatcttgtcagaaaggagaggtttgtttgtttgtttgtttgtttgtttgtttgtttgagacaggatttctctatgtagtcctgctggcccaggaactcaatctatagaccagactggcctccaactcaccacccacctggctcagaaaggacaggttgttttgttttgtttttttaatatgctaaaacttgtttaaattttcatatctagaaatctctatagcctatatagtccccactgtcttagttttggttttgagacaggatctcactgaagtgcacagactgccctcgagatgacacgagtgtagccagctttgagcttctgctccttctgcctctggctcctaagtagctgggagtataaacctgcaccagcaaacctggtgatggatttcagtctagacttcaagtctgtaagtaagaagttagccatgctaataacaaaagtaggtatgccagacatttgtttgtggtgctgtcgaggacagataggcagataaagggaagtcatggttaaaaagctaggacccataatggtctcacaacatgtcaggacttcccatggcacaccatacaagaagaaagaagaaaatggaaaaacaaaaagaaactataattcgggtgggaacgggcaggcagactctgttcaaaacactcaagtcgttgaactcttggggtgggagagcagggtctatctgtgcagtattgtccgtttgctttaaggcttcagtactctggctctcacctagtctcagtcaagtgcctcaaactatgatgaagagacatttttgtgatagcatgcttgcatagcaagctcaagttaattaattaaagatgtttgggacaacttccttatacattttggcgaagctcaccacttccaagtcaagggaaaacaagcaagtcagcatataactaacattatggtgttatagatttaaagtgttccccccaaatccataagttctaatcctcatcccactttgaggatgttaggacctgaatggtattgataacctaataaaagacactgattacctaataaaaggaagctgcatggcttttgtgccctgccggggcccagctacaagagagctgtctgtatgtcagaggtgaacacttaccaggcaataagcctgttagcaccttgttcttggccttcaaacctccacagctgtgagaaataaatatttgctgtttaaaaacccctttggtttgtgatattatgctatggcaacctgaaatgccaggacttgattggttctgtctgaggctgtcctcagtgtcacagagagattctctcagagcctgagttgaagcaggaagcagatctttgcaggcacagtggggtacagtaacattggcagtgtggagtgagtggcttgcacagacaaccaggacaggctgttctggctttccctgagcaccaagaataagaaattaggtccccgactcttcccttgtctctcatctctggcattattggccttttccaagcctagatctccattccctgaatctttattaggccctcttgggacacaaaattaccagtgacagaagatgaaagagtaaaagcaggctggtggtctgaaattcagtcagcaatttaaagatggttatagctatctaccatgtagatgaaccagatacaggttccaatgtccgatgcaaacgctgttcactgtgtaaaacacactgtgatttcattgcgaaaaattcactgcatgggtgtgagcaggagtgtgtcacggagccactgcgaaagtaagggacaagtttgagagctggttctatcctgtcaccatgtgagtccccaggaattgaactcagggcattaagctcagcagcaagtgcctttacccactaaaccgtcttgccagccaccattgttttttagctctctctgcccaagtcttgccatataacccaggctagtcttgaattcactaaataggccaggctggttttgaacgtatgacagccttcctgcctcatctttctaaatgctgagattgtaggtgtgagtcacctatgtattgactgtatcttttgaagcaggcaaaggatgtcgtctttcattttgtctttgaatagttgttatctactgatgaatcctggggtcccttttctctgctagttacaaccatcagaaaggaggtataagaccatgttacagtctcaaagaacctgggctggagggacaaagctctctctaccacagtagtgaaattatgtgtgcatctggccatagcatgtgaaactgttaggtgaacattctaagagggggagacatcgaaattgcctgaagacagcttcccgtaactcagaattgaattaaagtctcctctacagtttctagagaaaaactgagaatcacgtgatttgctcgaatttataacaaataaatagaccagatctggggaccctttgaaagtgtgtagcccatgaactgcagaagggttaatgtaaagcatacggctgctaggaaggcttgcatctgtgtggtgttccaattccactctaagaaggcaaggacattccccagatagcgtggagatgagcagctccgggcagttcacctgggatgacccaggtcccggcaggtttgcggctccatggaagccgactgcctgtgaagctagaacaagccaagggggtgcataactgcagccaaaccacacccagtgaagccaatagctttgctcgagagggaagtctatggagactccttgtccccagcctttaattagcaggtgtttcagacagcagggcttaccctgactcaaacaagcagtctagaaagatcagatgagcctctttactcagccagtcagctagctgattggccttagagtgttcagtgcgctctactgagttgttcccagctcctctgaattttccctccccgtgacacagaagccgcgtgtcgtgtgaggtagatgcattctgtgtgtacagtgacgcctttcgaggagagcacctgctcaagtaacattagctgagatgtgggtggcaaagcaggaaagcacaaagcgctcgctggagggcctttcctttcctctctcgctctcgttatatacagagtcatataggaaggctcagaaggcctagaagatgacaagcctccctgtcaatatcagacagatgtagcttggggcgtggagcatgagatttttttttttatttaatatgaaaagcaattgaaaagaaaaggaccagtccgcatggcagatcagacgcttctggttgcaccaatccgaacattccaggtataagttacagagctcgggtttattggcaaaataaaataaaaccaactttaaaacagcatcttcaaacaaagacaacaaaaccttaatgcccattcctccagccagaaatccaacacaacgcttaaaaagactccccagtgtcctgtaataagtagaccacttctttttccctaccgctggtttctgtcaaaccaggcttggtcatattattccaaacagtctcgttagcatgttaaccaggcaagttcaaaacccacagacaaactgtatatattccattaaaatgtcgaggtgctttttggagggtggtacttcaattgctagtattcattttattaattaatcacgtcttgccaatctttagatatttatgtcaagcattcttgtttcccaatttgaaatagtcctagttttccaattatacaggtaaatgttgagacatcccataatgattgtatttacctaagaagaaaaatagatttcctgaaatcccagcacttgctgatatcaaagctgcattaattctacgcacaggtatgttttctgtgttacacttctgtgtttgcaaaaataggacacactcttatttctcccttgtagtaatgcctttcatttcccttatctaacaagtctcttctgggcttgcatgatgtacttgtactcactgttcaaaatgcagggatgctgcaaaagaaacggggacgtacaatcctcctggatttccagaaatgagatgtaataaatattgcatagacttgtaatttattcagtctagtcttccatttttggatgtcaggatactatttgttgggttttctcaaatataagggaaacgtgcactgattgttggtgaatccaagttaaaattatctcggctaataatagtatttggttggtaacactaagccttaaaatatgacattataaacaacgatatgattcttggcagaagttacaaagctctggaagagcccagcagtctcttgcttgatagacgactgaaggttcttgaagcatccgagtctgcacttgctctatctcggttttcaaggcttcctggggggctggggggggggcaaggctccagttctaattgagcccatgctgttgtgttagctgacattgtttctcagaccctgtggttatgcagtgatgtgcaaggctgacctggggattctgggagcatttcttttgacctctatcgagagtgtttgctcttctgttctttgcctaacaaccagcagggccaccctcttgccatctgtgcatcctgcacataatggcatgaggtaatgtcacagaatctgtttgttgatgatttcagtatgagcaaaatagcccgggtgaattctaaaatgtactgtagccgagcttatatggactgggatgctgagacatggagggatggtggctcacagcaagtctcatggttagcagtagagccatactgacagctggaacttttttcctcactggcttcatgccatgcaatcagcaagtccgagtttgtggtacggtggtgtggaatttttggaatgcatcaaggaacaccattgctttggagggtgtcttggtggctaacagttaaactgtctttcataccaagatatctcagtttcccaaatatggagtttacttgattttcttctttgttgatctgggagaggctttatgagattgcgtggaatcttagtagcagaattcagtaactgctttgctttcgtttttgttagcatgcattatttatatgcggtaggaggtttcattatggcattttcatacatgtgtattatgttggcgttctttctcctagcatctttaggttggaatgtctcagtgcatcagttttgtaaatctggccacaatgaatcagttgttaagagcacctttgctgcttttgcagaggcccttgggtttaattccccgtacccacagagtggcctgtaaaacccctgttgcaggagaacctgatgccttcttctggcctctcaggtactggaatcacaactgagacatctgggactgtgatctcagtctagagagctgatgtttccaggctaggagaaatctttacacatcctcaggaccacacaagcaaggtgtgagtttacaatgggacggagccagttggattttcctctatgtcatcagggacttgtattttaactgtttttaggggattacaacaaccactggaaacttgccattctatctttactaaaaaggaaaggtattcatgtatttgtcatcagtctaaactagataaacaaagccaagccttaagtttggggacttgaaagagggctcaatggctgacagcactggctgtactttcaaaggacccaggttcagttcccagcacatatatgacagcttacaactacctataaccttaattccagaagatccaatactctcttgtggtctccaagggcactaggtgcacaagtggtacacagacatatatgtatgcaaaatacccatacatataaaatataataataatgggaacaacagtgatccatttatccttttaaaaggtactttgtttagtgctgtgacttgtttgttacttgcttgagactgggtctcattgtgtagccctcgttggccagaaactcaagatctagatcaggcttcaagttcacaaagatctttctgcttcagcctccaagaatctgagatacaggtgtgtgccaccacacccagcctgtgatatccttttaaaaacatttactttactttaatttttctgttttgccttcattttacatttttattctaaataatttaagagtttcttagtgtaaaactttcagcatggagccttacaagacatagacatgttatataacattttataacttttatttttgatattaaatgaattcatggtacacatgctctatttagcatatgattaagatttttttgtttgtggtttgggtttctccagacagagtttccctgtcttcagtgtacccctggcagtcctagaactcactgtagaccaggatggccttgaactcacagagatttgcctgtctctgcctcccaagtgttgggatatggatgtgccaccacagtccagcgatattttaaatctataatcactggactctagatgcagaacccacagacaaagggagacagctgtgatggcgatggggtataggagtgaatatgttgtaagagttgggggcaaaaggctcagctccaggaattccaactgactgggtgcaaccacccattttggtgtgcctattaaagagatgcttggtggtcaaagacagatgaagaatttaaccaatggggccaccctgggagcacagataaaggtgttcagtgacctaccttccaaagggtcatggtagctttactctaagaatcaaccaggaaacaagaactgtgcataactaaacagcctaggtaaacagttctggttgaccactggctggttctacaggatggtttgaagaaatcctcatgttttgagggaataagctagccacttctataaggtgacccttcctgcatagggtgacttgtctgcgaattctggaatccaaggtgacttctagggcaatccttggacacctgagggactcttttttttttttttttaagatttatttattttatatatatgagtacactgttgctgtcttcagacacgccagaagagggcatcagatccccattacagattgctggttgctgggaattgaactcaggacctctggaagagcagtcggtgctcttaactgctgagccatctctccagcccgaggcgctgcttgtaaatgcctaaaggagataggaacaagctagaggccgatccgttgggttggtattctgtgtttacttaccttgtgagccaagtgcagagctaaattgtagaggcttctcagcaaaagcagtccccaagtgcctgtcatgctaagtggtggctgctttgttccaaatgtcaccagaacattaatgtgtatattttatcttttcaaagtaccctttacttctgcccacctgactattatttcttattttcctgaggcttggctagagcggaagtcacctcctcttacctacatcttttggcagtcacactgaggagttcagtgtcttaactgagcctgacaaaccctgacaaccagtcttcctgactaacaactcaatagttctttccctccccctttaagagctattcagtcagtagtcgctaatcatcttccatatgctagatactattttaaatatggaaacttctgcaaaaccagtccctgtcttgaactatctggtgactcgtgaggacgtgggtggagtacaccaatgatcatgtgcagaagagacgtgagtagagaaagcaaaactggatactacaagaactaggcaaagctgtaactaggcacacctgatgaggaagggctttttcttagagagtgagctggagtggaatggttagaacacagtaaggttgcaagggtggaagcaactatgggagatggagactgctggacactgtagaagattcattgctgcgatccaggctctaggccattgacattgtgtggtctcgggggggggggggggggtaaagtgtaagctagttctacagagaaagacccagtcttaaaggcaaggcatagagtttgcattgtaagcaagtgggcatttgcggaggaacaagatgacagagttccattttaactttcaccaggaagtgggtggagaccacactgaaggttgagggtgtgaggcaggggaggtttactaacaggagaaaggatactcatggggctgatgttgctatagtggaagttattgttagagttgtgagttaaagagagaacgcataaatagaaagagcacatggattctagagatgatgtgctgaagccagtaggcctggatgtcctgagatgcaggggaaggagcaagtctggactgaagatgtttgaagacagtgactttgaactgcctatgccacattcagctggacacttttagagcagtcggttatttaaaaaaaccctaatctcagggacgctctggccaaaggaatgtttgggaatctcctggtctagatagtggctgaagggcctggaaaaagaatcggggtgggaggagggatgaagatgttccaggtggcttctgggtctcccatagttggcggggatggtgagagaaaagaaccgagagtgacagtgggaatctttgatactcagggcagataagcattggaacctgctggaaggggacagtactgcttccttcctgcacttacttctcttgctgttgtgagacgacatcgcataatgcggtcaagtatgtcctcgaaccctcaacccctctgctttccagatgctgcctgggtctattagcctgtgccatccctcctggcacaccctccattttccttctataatattgaacgtcatctcttactgataccactgcacttaccccattctctcttgtgttactcccaaatagtcccccagctatggacccaccaagaagccacagcatccccccattcatatttcgttcctttgtatccttctagacctaacaccaatccatgttcctcatgactggcctacactagtctgttccatagagatttgtttgagcttcactccactctacacttgattttgggctaactagtgatttgggctggagaattctctttagaataactcttttgaggaaaggggtgtagttttaatctttctctgtggcctggagtctggagtaggctatttcctgttatagggaagttctccttggacaaagtgactgacttgagtttatctgtttgaagtggcatcttgaggattgaacttgtagccttgagcagaagagggcagccaagtaagtctgtaatggatctcattctgaggtggtatcttggttggctgctaaccacatcataggaaggagtatggaagggagaagtcaagagtgagggatggatctttcctcagaatgggcactaggaatgtggaatgtactgtacctgtatcaacactgagatgtcaagattcaaaatgaactcaaactttacagctggtctttagaagccttccttctacaagcaatgtccactctggctcgatgaaaataaagactattaggtaagatagcaaggctccacgagaagtatcttaggaatttcatgttaataagaattataactcattgccatgactgtatgactggagtataagcgataaagtgagagctccagcatccatgatgagttgggttcactgacctatcccaatatgccaagtaaagtctcaagtgatggtgaaaatagagagaggggggatttactcaacacattgggaagaggaacagactaatgagtctaggaactcccaagatggtcttcaagtcactaaagtgagacctaggttgactagcataagaatggaggcagaagagcaagacgtattcacaaatgagcagtccccatctaggtgtgatctggtcagtcgtagattcagttctgctcggaagaagtccttatttcttgaagggatcaatctagtcttcagtgtgatatgatggcctgttatatcctggataattcctttaggttaagaaggtggtcagtcccatcacgtccttttggctgtcctagaattaaaggtaaatgcaggtttaggacagtgacttgcctctgtgctttaaccttgaaagaagatgagacaggttgggaaggcactctgagtggttaatatgcatatacaaactcaggcaggagactgtcccaaagtaaaggtgacagctataccgtgaaggcagtaatgtcacactttcatcttgcaatcagcttccttgtaggcaatgataaggagttagtgggtttttaacaaaacagcatcgagtgtccgttatgactgtggttttgttggttactctcaaagggagggtttcctatcagacaaagaggtagttactttggaaagaacagtgaaatagtaccctctttttctgacaggtttagaatttcatacccctagacccccaaaggaaaacgtaagccttttcagtctttagaaagacgatctttacaacacccaaattgcttggccatttaagaaattatgttctgggttggataatggcagttttattgctgactaaccaggattcactcacaggggcacaacacagagagctatgagggagattcaacaactgaggtggctgcattttaaacatctaatttgcaaaggaaatggtgattctgctgtgtgtgtgtgtgtgtgtgtgtgtgtgtgtgtgtgtgtgtgtgcatgagtacatgggaatgtgtgtgtgttcctttgaacacaccagaagagggcatcagatcccattacagatggttgtgagccaccatgtggttgctgagaactgaactcaggacctctggaagagcagtcagtgctcttagctgttgggtatctcttcagctcaatctttcccctttctgcttcttagttccattaacctcttcctagttagttttctgtgagagcaaagtagaaatacccaatgctagcagaaattcagtatgcactcagaaagggcatgagtagtaggaagactggaggagctttaataacaggctcagcagctgtagctgtctgaagaccagcaagtgagcagcatcacacaccatcttctctcagagcagactgatagccattagttcccagaaccaaataggcttcattccatccattaaccaaaccctaaagttgaagtcgttagaaattcttttgtcacttggctatagggacccactgatagatagatatcctgtcccagaggataggaggatgagaagggtgtatttgtgaagcactgtatcatttacctctggatacagaactgtatgtgcttggtatgagtttcccagcactatggaaagtgtcccattgatgtatctgaatggagcttactgctcagtgtctttctgcatggcttcctacattcagtgtctcccaaccataaaactggaaatggtaggaatttcatttctttttaaaaattatttatttttatttatgcacgtgtgtgtgtgtgtgtgtgtgtgtgtgtgtgtgtgtgtgtgtgtatgctgcaagtgtgccggtggccacagaggccaaaggaggtcactagatcccttggaactggtatcacaggtagtcatgagtggcctgaggtggcgactgggagccaaactcgggtcctttgaaaaagcagcaagctcttaaataatgcctatctctccaccccttgacctccctttcttacctgctttacaagagagataacaggagcctgtgtatgaacagcagagttccataaaaaccaccatctccagaaaagatgttgctaacggcagcgggacatattgaaagacatattctgtctcccaggctcatccctgtagacgccccttcaagctcagcctgagaagcccaggcactgtccaatcaatggtggagacaccaagtagctagcttgcttactctctctctctctccccctctctccctctctctctctctctctctctccctccctccctccgtccctccctctctctttctttctacttttagaagaatgatgatatcttaatattacttccttctatattgtctttttctgtgtttctctttctgtaacccttgttgtttttctcttggtaccttcaatttctatgttgatccttagttcagagtctgttcctggcaagatactatggttttgtgtgtgtgtgtgcacacacgagtgtgtgcgctcctgtgtgatgggcgatggataagtggatgtcttggcacaggttgatgaatgccatgatagaagaataaggcacacacaaaccaccgtgcttgtggcaataataacagcatggaagtttttgggtttagaaccaagcatcttgttaactactttccaggcttcctatttgtagctcttacttcagtgtgtgagacagctcctcataaactatttcatagaggagagatttcaagctagaggcatatgacttgtgacatcagtgatcaggactggaacctaggtctctctgccagtgtcacacagaggagttcactcagaggttgcattttctaggtttgtgactaaacacaggttttttgagttgcaggatatggtagaactatttacttgggaggctgaagtaggagtttcatgtgttaaaggctagccttcgatatagaacacaaccctgtctcataacaacacaaacaacaacaaaagcagaggtgtcgaagagatagttcattggttagagcgcttgtcagtcttgtagagggctccggtttagttctctgagctccactggaatcaggcacatgtgtggtacatgcaagcaaaacatcaaataaaacacacatactcatgaaataaaatcatttcataaagtaaactatctgtgctctgcctgaagtcttacgctgtgtttcatctgtttgttttctcaggagttcctcaggtcctgattgaagcacttgaagtagcttatctgccagctctacctccctgcttgtttgcagaaaccccgtggttcatctcacacctcagctggagcgtggattgcacatctgtcataatcccactacacgtctctctatggaacactacagacgctaatctctgcaaaggcaagtagcctccctttttggtcattgtattcctactacctagaagttattgcctaacttggagcccatccctgggaccacttagtcactcaccgacatggagcccatcccagggaccacttagtcactcaccctttcagaccacacaacttagatatcacaacaacatacacagcaggtaaaattcttaccctcactttataaaggaagagactaagacctgtaaagttctagctggccattcagaaaacagccaaaccagggcatggatcctggttgtcctcaacttcttttacatttttattctttttgttcctgatcttttttttttaaatccttactagatatttttctttctgtattaaaaaatgggaagttgagagactacattttctgagcagcacttgtatcccctttagttgaggacctttgaaagaaggggtgcatttagataagtaagatttaagtttcttcgggaaaaaatatagaaaataaaagccacataaaatgcctgtgtgttaaaaatggattttactcagtgaatacacatgaaagcccatcaattttttgacatagctcttgttttatctcctgattccagtggagctcagaagagagtgtggttgatcaccacctagaaatcctaagtataatgcaagcatttcagaggcctgacattcatcacctacggacatagttatccgggattggcaaatcccaagctacttgcttccctgagcaccagctaaggaaaaatagagcagtctctgcaatcagattttagttatatttaggccatgttttagtttctctgttggatgaaggcttgaggcaggtgttaaagataagaatattaggcatgccaggcggtggtggcgcatgcctttaatcccagcacttgggaggcagaggcaggtggatttctgagttcgaggccagcctggtctacagagtgaattccaggacagccaggactacacagagaaaccctgtcttgggggtgggtgggggggggggagaattaggcattacaaacttggtcaggtagagagtatagaactaagaaaatgaccttgaaaaggggtgttgagagggtttagctggtaaagaccccttactacaaacctgacaacatggatttgatcctggaaacctatgagacagaaagagggagagagttaactcctccacttgtcctctgattgctacacttgtgccatggcacccaagtatgtgtgtgtgtgtgtgtgtgtgtgtgtgtgtgtgtgtgtgtgctgaaaaagccaaataaaggtttttgttttaaataaaggaagaaaatgctcagtagaataacactcatcttaaaacgaaagaaaaagttgtgtttccactatcagccagcagagggatcggtgtgcctgggcttctgtgacggacccactcaggcctcactgcagtaacaggacttgaccgtgtagaggctctgcagatgggtaccaacacacccagcacgtttgttttttcagcaatgatgacttcacactgctcagatgctccacagtatgcactgctctttgcaaatctcattgacaaataatctgcctttaacttcaatgtcagccaattacttgccttagattttaaagtttccaggaaaattggtgaatagtttcagatgaagtgggtgctgaagaaatagatgccttgtttatttgtgtatttgtttgtttgtttgtttacttttggcttttcaagacagggttactctctgtaacacccctggctgtcctggaactcactttgtagacaaggctgcctcaaactcgctatttatgtcggtcttttcatttatttatctattgataagacactgctagctatagcaccggtgatcttgaactgtggaactcaggcccccctccaactgacagccttcaaagtccgggattatacacatatgccatcattcccaactgaaagctattcttttattttaacccacttaataatccaaggacaactgattgattatatttaagtagtaactggggaatgtagaggtctttactttctaggtatccttagatcttattactaagtcggggagactaccacggccattatacaagaaatgcctctccctcacactgtagagaccagtaaccaaggagtctgaatgttgccaccgtgacagaggatgctgcaactccgcagtacagataaagaaaacgaggcccagagaacccacccagaattccgtgcttcctggggttatctgagcaagccgtgctccattatgaaaagatatagttccttggccaccttagctacatttgtctcttcagttttcctctctttccttcaggttgtctaactgagccccgaggagcccagggccaccgctgtcatgacgactgccatcctagagcgcctgagcaccctgtcaatgagcgggcagcagctgcgccgtctgcccaagattctggaagaaggacttcccaagatgccatgcaccgtcccagaaaccgacgtgccccagctctttagggagccgtacatccacgcgggctaccgccccacggggcacgagtggcgttactacttcttcagcctctttcagaagcacaacgaggtggtcaacgtctggacccacttgctggctgctctagcggtccttttgcgattctgggcctttgtggaggcaggggcattgcagtgggcctctccccacaccctccccctgctcctctttgtcctgtcgtccatcacttacctcacctgcagcctcttggcccacctgctgcagtccaaatcagagctgtcccactacacgttctactttgtggactacgtcggggtcagcgtctaccagtatggcagcgccctggctcacttcttctatagctccgaccaggcctggtatgagctattttggctttttttcctgccggcggctgctttctgtggctggctctcctgcgctggctgttgctatgccaagtatcgctaccgacggccttatccagttatgaggaagatctgtcaagtagtaccagcagggctggccttcgtcctagacatcagcccggtggcacaccgcgtggctctctgccacctggccggttgccaggagcaggcggcctggtaccacaccctccagatcctcttcttcctcgtcagcgcatacttcttctcgtgccctgtccccgagaagtacttccccggttcctgtgacattgtgggccacggacatcaaatcttccacgccttcctgtccgtctgcacgctctcccagctggaggccattcttctggactaccagggacgccatgagatcttcctccagcgccacggtcccctgtctgtgtacagcgcctgcctctcctttttcgttttagctgcctgcagtgcggccaccgcctccctcctgaggcacaaggtcaaggacagactgattaagaaagattcctgaggtccttcaaatgaggaaaggtgtggaggtgggctactgtgacttggagaaaacttgacccaataatagaagttgactttttatttttcaggcttgattttttttctaaattaatatgtattacgggctgaggatgaaactcaattggtagagagtgcttatacagcatgcagaaagcccagggtttgatttcccagggccacagaagccagggggaggcacaggcaggaagatcagaaattctaggtcaccctctgacatatagtgagttcaaggctagcctttgatacatgatagataccatatctcaaacaaaattattatgtattttcaaaggcatggtatgactatggaatttcaaatgcaggccatttgagagttttaaaacagtgcgttcatttttctgtctgggtgatagccttgtttgggaagagatcttggctaagattcatgagaccccaaactaaggagagccatcttcacccatgagcaatgagcagaattctggttgtagcttccaaagagtagtcctgaaccaaacagatatttaaactggactgccaagtataacctcgccctaacagaacagccaccctccgcactgctgggcttggtgtctgtgtaaactgaccaacgaactctgtcttatcaggatttcagattgctttgggtggaaaaaaacagaatcttcaagaagtttccttgaaactcttagacaaaatggactattcaatttatcattcctggtctcgaccactggttcttctctcaggataaccaactaagctggccaatttgcctgaagtactactgttctcatccctagtctgcatggtaacaaagaatcccgaagctattacccttccaggaaatgcttggagccatatgaacattcaggaagctgattcccgcgtaatacagaggcatcgacagatttaacagtgccaagagctgccaagagacccagccagcaagcacggctacccttgcctgcctgctgcccatgggacccttgtagtttatatctgaggacagcagtattaactgccagccacttagggttgtcttgcaggtcaggagattggttgtctgaaggtttgaagagactcctttacaagcatggttctaaagttctccgagaaagcagactatgtcaagcggatcctaagatccaaggttcaagctgctgttagatgctgccccgtgaaggaccaacgcagctaccccagttcagagtcctcatgaggcagttccacctccgacttgagaagaaaccttaaaatgggtcctaggaggggtgaatgtgtgctcaccgtcgttggcccctgaaggtcccttgagtaagaacgaggcacctgatggccgaaggcactgtccgtgatatggctgccagcccctgatgtgaggggagtggtgcttgcagctgagatgttctggccacacagctctccccgaggactgtcttctgcatgaacccagtggaggaggctgtgtttgaggaagggctgaggtgccctctactcgaaggctgcacttcctatcattataaggtccctgtgtactaaaaaaggaagctaaagtttccaactccagttaatgaacctcctcttgctagtcttaaaacctttgttttctatatatatattttttgtgcgagtgacttgtgaattttgtgccttatacatgggaatgtctaaactcttttattttaatatatgcacacatggaatttttctgttttgtgttcttgggacaagaaaaaaaaggaacccccaaaagctagagtgacctgtcaatcaactattaatctgtatgtgagaggggtcagcagcagtatccctgctgcttttaaatcaagagagcatgtgtctcctgcactgttttattagatggggttcttgttcattcatggtcaagaagatgaacgcctatgctagccaaatgacccaaggttctgattgtctaggtcaagttcatgccaaggaatgttagcaaaactgaacgggtttggactgagcaaagacttcttagggtgtgtatgtgtaaacgctccaagtagagggtctgtttaaaatgggaaccagaaagtgttagaagttctgctgttgtggattcaaagactgtattcttttaaaagttggtgggaaacgtgagagaggaaagggatgaggaaggcggtcttctggtggtatctgtgaacaaagatttttttttttcctttttcctgagatcagatctcactgtataacccaggctgtcctggaaatccttatgtagaccatgcaaaccttgacctctagaactctatagaaatcaagctgtctctgcctcccacatggcagggctaaaggtgtggcattctgagtcttgtggacagggatctgtggtattcaatggtcctgcagcctagggtcgagctgaactctgttcctcacaagtctgtgacacccgtgacacccgtgacacccgtgacgcccgtgagaaacgtgagatactggcgttcagttcctagtttaattatacaactattgctaactatggacttgggaactgatgaaaaagaaaaagaaagtgatttctatggagttgggacttgaacctaagacctgcaacatgttaacaaagagttctcccattgatgtgcaccccaggccaagcaaccgtgtatttataatagatatttggggagggcactgaggtggggggaaaacaccagtatctaattggaataatgcaaatgcctttacaaatgcatacacaaatgggtgatttttaactcttcagagtcctcaaacagtgtcatcaaaatgggcctatcaggatggtaaagactaggctagtttaaaagtaacaaccaagaattgtaaagaggagtatgcatgcctcttgattttacaatggagtttgtcaccctgcaaaatcagcataatgtttaaaaaggtataagggagatagtttatcttgctctccaaaactagaaattttggttgttgcctctcttagttaagactttcaacccattaatatgtaaacgcctctgataagattaaaccatcagtcatctatactttctcatgaataagattcttgtgggttgatataaggccccacttagttcaagaagaggatacactggacatggggggcttgtttctcatttcagaatcctgacttttgtttgacggtgaaggctgtttttgttgtttcttgttcaaggtgtttgttttgttcgagatggacctcactgtgtatcccaggctggcctggaactccagatggattctcctgtcgcagtcggccaaggagctgggattccaggctgcaccaacaccatatccaattctaataaaactaattttaaagttcttaaagatgtcagggttacaatttcagctcttaagtctctcaataacaatagtgtaagccatagactggaagcttgaaatagaattcagagccctgacaggagggtagtttagccctgtttcggtcgccctccatttgtttggttactattctgtagttccacctgcatcctccagagggtgatgttgtcgctctcagtacactctcagagcttgttgccaaggcttcacggctagatctgtgttttgcttggttaaagaaaaagtgtgggattttttttctgtctctataaacctacttacgtgaataatcattaatcagattttgcacatggatttttgtcgtgttggtaatggacccagagctcattctaaagctgggttttatttagcctgccaactgccaactgaaagaggttgaacactacatctatctaaaactaggaagatataaaaactttgaaaaataagtctactgcagaataaactacccttcgaagaaatgtggagttgatttctctgcagatttcagtataattgcgtagatattcctagctacatcacaatcttattaaagatcttggattttgaattgattttggcctacattattttgagatataaaaattatgaattacattgttgtgttcttcagagtcaacctgagtggatcacaaagtcagatccacagagtattttgaaaatagtgtttgattcttccgtgaaagttgtctgataatcttgcctaaccccaaatccccgtcatgtgtcactgggattgtcccttgcccaagcaattggcttcctctgacagataggagctaaaagtagaagggtggagctttacaaaggttcccctgcctttcaaggagctgtgcagaaagatcggtggaaaggtgggtcttttgtttgtcttgattttgttttttaaaagcaatatctgattattgaagaaaatgtagaaaagtgagaggaaaagataatccatagacctatttaataacaaatgttttgagggaaaagaaaaaggtttttatcaaaccattttcaatagtaaagtgtatgttaataatgccatctaaaagtccctggaggcaggggaaggaactaaagatttttaagcaactgactactttcattttataaagtacgaaatcagcagtcttcattcagttcggcttacaggaataccaagagctccattgcaccccctcccgacgttacgccatgtacataacctgatgacgccaggttagcagacaaagtaggtggcacactggctctcctgttgagagaactgtatgacatgcctcctcagactcagatgcccagcaaggactgtgctagagagcctttagctggagcccagcccgcccagcccgcccagcgagcccagcgagcccagcacgcccagcctgaaaactgcatacgtgaatccactgatagtcatctcgcaaatagctaggactgccgagtaccaggctttgctctaagcacctggaacacagtagcaaagaaagcacacagtccccttagttgtagagaaacagaaaactaagtagatgaagtgtattcgttgtgttattggtgccaggagaaaaagtcaggaagaagtgtgagcgggagagctagggtgagtttggcttggcttggtttagtttggtttattctatgagtgtggtgttttgcctttaagtatgcctgtgcttccaatttgtatagggctcatgaaagctagaaaagggcactggatcttctgaaactggagttactggtggttgtgagccaccatgtgggtgctgagaattgaccccaggtcctctgcaagagccaccatcagctcttaagagctaagccatcaccccagccctatggttttgatacagagtctcatgttgcacagattggcttcagacttgctatgtagctgaacttctggtcctgctgcctacaactccagagtgctgtgatcatagcaaggtcttatgcagcgattctggtcaaacccggggctttctgattgctgggcaagtgctttatcaattgggttacatccccaggtccatcaactgtgaaagggaagtgaggactctgtgttttgtccaaagtgtgccagcttagaaaggagaatggtgagaatagaggttggtagttaggatggagcgcacaagcccttatggggactttactgaaaccaggaaatgtgggggtgggtgttctggtcgctcttaattttttaaattatcaattactcattattattctatttccttccatttacacaaaaccaggttattgttaggttcttccattcattggcctggcccagcaagctcttgccttcctgtgggcacacatttggggggtggtagattgtttccagagtatttttaaactgctcaggatgctgggttctgcttcctagaaagacttcaaatatttccttctcgttctgttagcatttgaattgcactctgggtaattttctgggcagacatggaaaggcacctcgtcagcagagtctataaataactgtaccagcttttatgacacttgactaatcctgagtttttttctcagtttctttcacacacaccccaataacaagcctgttagtacttcccatttttgttgcccctgttttacaataaggaattgaggcataaatcaataaattaacacaggactacctggtttggtaatggagtcttccagaaactcaggcctttggatccgaagtttccattcttccccatcagaaccaagcgaacatagggaaaaaagatgttcccccatgtctttgtgtgaactaggagagcttttaaatcgagagaagggggctatgtagattccctccacatccctccctcagtagaaaaacaaacctttgtgtgcagttcttggtgcatttctgcacacactggccacacttttcctcagagtgacactgctgggctggctgctaccagagatgaaattccatacgcactcagcacaaggattcagctacaatccccagaaagactttctagaccataaacctgcttaaagaaccacgaactggcctcaaattaccatgtctttgggtggcacgatgctgtaagtgtatctcatgtctcattcatgtaaacgcgagcgttattccaggcggagccaactttttctcaaagacagctaaagaaatatatgtcctgtatactgtttcttggaatctggttctgatataagaataatgccatagcttggctattggggctgtttgccttcagcgaacaccattggcagtcactcccaccatttacaatgagcagaatgctttgggttctgtacacagcccagtacccactctctgggctcccaagcatctctctccagagcagggcacctttgcatttgggaaggctttctttccaccaggatgggatgagatgtgcatcatcctctcagagacacagagttagagagggcgttctgctatatcttgagtaatttctttgttttcttccacatttctaatgccatgttcctattattacagactctcctaggcatcagggggagcagggtccccaaaccacagacaggcctgcttacctatcctctgttactgtggtccccaggtctacaggagaaccctaccgtgcctttttctttcccatctcaattcccaactgttttgtgtctcgtcccacaaaaagtatgccaaaaggatactttgctgtgcaagccccaagacttgagttcaatccccagaacccatgttattaaaaatgggtactgtattgtacacttgtaatcccagtgctgggcgcagggcggggcggaggggtgtggagacaggaggacccctaggcttcctggccagtcaccctagttagcaatctccaaactacagagagatcctgtttcaaaatgaagtagccagctctgaggttgtcccctggctttcacatgcctgagcatgcacaattgtgtgtgtgctcgcacatacatgcgtgtactattgtgttgcactatccatgggaagctgtgaataaatgtctgctggccccagttagggaactcaagacaaatgaaagtacagatagcacacaaagtgtttaattcccagcacccttgtggtggctcctaatgacctgtaactccaattccaaggaatctggtgccctcttctggcctcctcaggaactgtacactcatggcacacagacattcctgtaagcaaaaacccatacatggggaaaaaaaaccaccaccaccaccaccaacaacaacaaaaaaacccaaaaaaacaaaaaactttttacaagtccccctccctgttcttttttagtggtaacttaattttatcatctatagctttcccagttcccagccaccctttagtccatccattcaggaattctcaaccagacaaagattaccatagtcattgcacttataagatgctaagaactaccaagagagctaatatgtgctaactcattctgtgttctcagcaactttataattttttattattctgactgctattatcattggctattattatcccattttgaaaccagggtgaggttaacaaatttccaatgggtcacagaactggcaagtgagtgacagaatcaagtcctttgattatcctagaactccctctcctcaaagtcacggtggtccacctgtgcctgccttccaagtgcttgctgtaaaggcatacactgccattacctggctcagaaacagaatctatacttctatgtcattcagaggttgtctgtctttctttccccatccttatcttctttttctttctctttctttctttctttctttctttctttctttctttctttctttctttctttctttctttctttctttctttctttctttctttcttccttctcccctattcttccccttgttcagcttttgcattatggagaaacttccaacatagacaaaatcagacagaactgtataacaaatctttatgcaatcaagttgacaattatccacttatagatagcctgatttcatttgtagccccaccccatcagcaaaccaggcactttcccccaagatgcttccttgattatttttaaaggatggacatttcttcttttttaatctacgtgggttttttgtttacttttgtacttattcagagactgagtgactggctgtctgtgacccagactgacttagaatttcctatgtagcataggctgtccttgagcttgtagcaacccacctgcctcagtgcaaggattataggaatctaacatctggctaaggtgaaatgttttcaaagtaaagatcataatacttctactatgtctaaaatactaatcaattccttggcatcattaaatatctaatgtttgattcccagtgactttacaaatgctataaataactaacatgatgtctaattgtttgtatcagggtcccaacagagcccatactgccattgattggctgttgcttatggttcttttaatctgtaaggtctcttccatctggattgcattggcagagcaagatctcatgtcttggaaatgtcaatactccaaccagctactttatcctgtctggggttccaccaggacttctcattgcatagattgcagggaagagcttgaggcatcaataaactcacaggaactcactcattgatttcatgaaactatgagaatctctctctgtctctctgtctctgtctctctgtctctgtctctctgtctctgtctctctctctctgtctctctctctctctgtctctctctctctctctgtctctctctctgtatatatatatatatcttagggttttactactgtgaacagacaccaagaccaagacaactcttataaggacaacatttaattggggctggcttacagattcagaggttcagtccattatcaccaaagtgggagcatggcagcatccaggcaggcatggtgcaggaggaactgagagttctacattttcatctgaggctgctagcagaatactggcttccagacagctaggatgagggtcttgaagcccacttccacagtgacacacctattctaacaaggccatacctctgaatagtgccactccctgggctaattatattctaaccatgattatatatatttcatatataatatatatgtgtgtatatgtatgtaatgtatgcatatatctgtgtatacacacacacacatatatatattcgatgttattatcatcgtcttttcaaccctctctctctctctctctctctctgtgtgtgtgtgtgtgtgtgtgtgtgtgtgtgtacagttgaaagctttattactccagagtcatctacgaagcgagggcttcaatatttctccagtgctaaatgaggaatgtctgttattttcacagctgtgagtggattaaggtaaaaaaaaattcagttaggaaacagttactagtcaacggttccttgatgtcttaaacccctgtctttggacttataatttaatgcttattcagctatagtacctacgttaacataggtatttgagaataattattcttaagataaaggaactttatggcttcttttttgaggcataggcagggaaaggagaaactaccataagtcaccaaatatgagcaaaattagatcaattgggagcctattaggtgacgactaaatttataatgttgttgttatagctcataagtttgtaataatcattgcatagtaatatctatagtaatcagtggcttcagtaactgtttggcaccttgagtgattggtacagcatttcttcaaattaataacatacatttccaaacttctccctataggtgaagtgggggcaggtgcaagctaaacttgtatattcactgttagtgggaagcctagcccataacaaagcatttattgcaccattttctcttatttatttggtgtgtcatcaattctaggtgcaattaactttattattgtagctataaaccgccaaccacaacagtatcaacctctttattcatagaaacagttcttattaccccatcatcctccctatcttcaagcattataaaatgcttttcaagcaaacaacacttcagtataactttttgtttgaccttttagagggagggggccctgttttatgtcagcacatccagaagtacatgttccaattctaactgaattgggcaaagtttcttatgttgttcctattactcgggtggaaaataataacatttaagtacatggatatcttattccgtgttctatttctgtgaagagacaccatgaccacggcaacactctaataaaagaaagcagccagacatggaactggagaagtagctgagagttctgtgttcagattccagacagcaggaagagagagacactgagcctgtcttactcgggcttttaaaatctcaaagctcaccctcaggaagccacttcctccaacaaggtcacacctcctaatccttctcaactcgtgccaatccctgatgattaaatatgcaaacaatgagcctacggaggccattcttatgaaaaccaccacaatggcgatagtctgagccacaccatcaatttgcctcctgtttgaggccattatatattaactgtaggtttagacattgatattccagctttctttacattggctactataattattactatcccaacatgagtaaaagtacttagctggctagccaccctccatagaggtaacgtcaaatggctcccgctttgaatttctttcttacagtaagtgaaggtggaattttcttatctaatcgctagacatcataggtgcacagatctgaacacaggtcctcatggttgcctgccaagtactttacagactaagccatctcctaccaactcacacccccgtttttaaggcaaagtcttaatgtgtgccttagggttactactgctgtgatgaaacaccagcaccaaaagcaagttggggaggaaagggtttatttggcttacacttctacatcattgactatcactgaaggaagtcaagacaggaactcaaaca

SEQ ID NO: 3370 - DNA, 2823 bp, Mus musculus
tatacaggtaaatgttgagacatcccataatgattgtatttacctaagaagaaaaatagatttcctgaaatcccagcacttgctgatatcaaagctgcattaattctacgcacaggagttcctcaggtcctgattgaagcacttgaagtagcttatctgccagctctacctccctgcttgtttgcagaaaccccgtggttcatctcacacctcagctggagcgtggattgcacatctgtcataatcccactacacgtctctctatggaacactacagacgctaatctctgcaaaggcaagttgtctaactgagccccgaggagcccagggccaccgctgtcatgacgactgccatcctagagcgcctgagcaccctgtcaatgagcgggcagcagctgcgccgtctgcccaagattctggaagaaggacttcccaagatgccatgcaccgtcccagaaaccgacgtgccccagctctttagggagccgtacatccacgcgggctaccgccccacggggcacgagtggcgttactacttcttcagcctctttcagaagcacaacgaggtggtcaacgtctggacccacttgctggctgctctagcggtccttttgcgattctgggcctttgtggaggcaggggcattgcagtgggcctctccccacaccctccccctgctcctctttgtcctgtcgtccatcacttacctcacctgcagcctcttggcccacctgctgcagtccaaatcagagctgtcccactacacgttctactttgtggactacgtcggggtcagcgtctaccagtatggcagcgccctggctcacttcttctatagctccgaccaggcctggtatgagctattttggctttttttcctgccggcggctgctttctgtggctggctctcctgcgctggctgttgctatgccaagtatcgctaccgacggccttatccagttatgaggaagatctgtcaagtagtaccagcagggctggccttcgtcctagacatcagcccggtggcacaccgcgtggctctctgccacctggccggttgccaggagcaggcggcctggtaccacaccctccagatcctcttcttcctcgtcagcgcatacttcttctcgtgccctgtccccgagaagtacttccccggttcctgtgacattgtgggccacggacatcaaatcttccacgccttcctgtccgtctgcacgctctcccagctggaggccattcttctggactaccagggacgccatgagatcttcctccagcgccacggtcccctgtctgtgtacagcgcctgcctctcctttttcgttttagctgcctgcagtgcggccaccgcctccctcctgaggcacaaggtcaaggacagactgattaagaaagattcctgaggtccttcaaatgaggaaaggtgtggaggtgggctactgtgacttggagaaaacttgacccaataatagaagttgactttttatttttcaggcttgattttttttctaaattaatatgtattacgggctgaggatgaaactcaattggtagagagtgcttatacagcatgcagaaagcccagggtttgatttcccagggccacagaagccagggggaggcacaggcaggaagatcagaaattctaggtcaccctctgacatatagtgagttcaaggctagcctttgatacatgatagataccatatctcaaacaaaattattatgtattttcaaaggcatggtatgactatggaatttcaaatgcaggccatttgagagttttaaaacagtgcgttcatttttctgtctgggtgatagccttgtttgggaagagatcttggctaagattcatgagaccccaaactaaggagagccatcttcacccatgagcaatgagcagaattctggttgtagcttccaaagagtagtcctgaaccaaacagatatttaaactggactgccaagtataacctcgccctaacagaacagccaccctccgcactgctgggcttggtgtctgtgtaaactgaccaacgaactctgtcttatcaggatttcagattgctttgggtggaaaaaaacagaatcttcaagaagtttccttgaaactcttagacaaaatggactattcaatttatcattcctggtctcgaccactggttcttctctcaggataaccaactaagctggccaatttgcctgaagtactactgttctcatccctagtctgcatggtaacaaagaatcccgaagctattacccttccaggaaatgcttggagccatatgaacattcaggaagctgattcccgcgtaatacagaggcatcgacagatttaacagtgccaagagctgccaagagacccagccagcaagcacggctacccttgcctgcctgctgcccatgggacccttgtagtttatatctgaggacagcagtattaactgccagccacttagggttgtcttgcaggtcaggagattggttgtctgaaggtttgaagagactcctttacaagcatggttctaaagttctccgagaaagcagactatgtcaagcggatcctaagatccaaggttcaagctgctgttagatgctgccccgtgaaggaccaacgcagctaccccagttcagagtcctcatgaggcagttccacctccgacttgagaagaaaccttaaaatgggtcctaggaggggtgaatgtgtgctcaccgtcgttggcccctgaaggtcccttgagtaagaacgaggcacctgatggccgaaggcactgtccgtgatatggctgccagcccctgatgtgaggggagtggtgc

SEQ ID NO: 3371 - protein, 353 aa, Mus musculus
LSPEEPRATAVMTTAIRLSTLSMSGQQLRRLPKIEGLPKMPCTVPETDVPQLFREPYIHAGYRPTGHEWRYYFFSLFQKHNEVVNVWTHLLAAVLLRFWAFVEAGALQWDHTLPLLLFVLSSITYLTCSLLAHLLQSKSELSHYTFYFVDYVGVSVYQYGSAHFFYSSDQAWYELFWLFFLPAAAFCGWLSCAGCCYAKYRYRRPYPVMRKICQVVPAGLAFVLDISPVAHRVCHLAGCQEQAAWYHTLQILFFLVSAYFFSCPVPEKYFPGSCDIVGHGHQIFHAFLSVCTLSQLEAILLDYQGRHEIFLQRHGPLSVYSACLSFFVLAACSAATASLLRHKVKDRLIKKDS

SEQ ID NO: 3372 - DNA, 65553 bp, Homo sapiens
tgagctatgattgtgctactgcaccccagcctgggcaacagaaagagaccctatctctaaacaaaacaaaaaaaaagagagagagagagaagagaagggaaggaaggggaaagggaagggcaagaggaggaagaggaagaaagaagaatgaggaggaggaggaggaggacaacgatgacactgggcagagctgggagtggagggaatgcaaacatttaaatgggccaaagaaatggggaaggagaaaggaagcagagagcccagaggagagatgactctcctgcccttgcttacacaaggtgctgaccacacagccactgcgaaagtcgatactaaatcttggtgctagttagaggaactggtaggttgagtgaaacaggaagaggagctgctcctgaatatctgttcccctgaggattttatatgagtcagagcatgccatgggaacccaaagtaaaggactgtgtttactttcttttatactccatgtgtgtgatgaggtgactaacggtcaaactatttggtcacggactgtatagctctctcttccatgctgaggggtataagcaggagttgcacccatgatttttttcctgtaagtgtcatactgctgtgtgcctctgtgcttttgcacctgctattcctcagccctgaatgctttcctcccctcttgtctgcttattagtctcagccttcatgactcaccctaagcttttgctgaccctcccaacactaaaaagcttggtaactagagagctaggaatgcctcttctgtttttttcatagtgtctagtgtacctttcttgtagcccttgtaacactgcattgtcatcatttctttaaatatgttttctccactagatcagagagtgaagattgcaccatgttcatttctttgtcctgagatcttagcaaagtgcttttagcacctaggtggttttcaataaatatattctgaatggatgaaataattaataatagaatattgcatactgagcaatagccatgtgtcccctttgtccccagactaaattttatttagtgtcttcatggcattgtaataaggtacttcccttctgacctaaacaatttgctgaccccttgtcagaaatgtggagggatcagggctaattggatttgtccaaagagaaaaagagagagatttaaagcagtcaggcctcatcctgctgcagcgtttgctggactcaatctcaatagaattgcatccactggcacaattcttttccagtcctgatttaatagaggggacaagagatgtcaaatgcaccattaaagagaagcataggtagaaggcagactgctcagatccaatgctgctagtcaaaggaccagatgtacccattagtggccgttagaagggggctcattgcctatgaatctcaggttcctggaagtctgagcacgccaagactgacctccctgccacccacacctgctgtaccacagatgatgaactgactctgacagtttttggttgcctgtagcaagttacctcttttaacatctaatttaaaagagaataaatatttgttgttgttatgagctcagaagcacaggatgttcacaaagcaccccacacatcaccatcacaattgctataattaactttactgtatttttgttgtataataatctatagctaattatagcccattagagttgtatgtacataccgagaaattagcgacagccatttacgtatgtatttattttataaagaatatttggaaaatattggaaataattttttaaatgttatcctggaaatgtcactataaatgtacagcttctttctctttatttatttttttttttgcagtgcatgtacagcgtatcttctttgaaaaaaaaaaggatcacttggctgggcatggtggctcacacctgtaatcccagcactatgggaggtcaaggcaggcagatcacctgaggtcatgagttcaagaacaccctggctaacatggtgaaaccccgtttctactaaaaatacaaaaattagccaggcatggcacactcccgtaattctagctgcttaggaggctgaggcaggagaatcgcttgaacccaagaggtggagactgcagtgagccgagatcgtgccactgcactctagcctgtgcgacagagtgagactctgtctcaaagaaaaaaaaaattggatcacactgcactacaacctgctctgttttactaaaccatagaaccacagactgcatatttctctgtgccatacagtctatgtgatttttgaagactgcacagtatttcacatcatgcatagaccctagttaatttagtcagtcctcagtcatcataccttattgcagggaatacttgctttgtaagcctcctgctggaacttccccttgacattgccaggatttgaaggctcttgtcaaaacccccaggctgtcagatgatttttggaggttacctggaacgtttagggagaaagacccgataaacctggctttcacactcagagtagcttccagggttcttcctggatgtcctcagggctggaggatcccaggctagtgggaaggataatcagagaattttaatttaattgagagggagaacaaaggagaattttactttagtttgaactattcaggatacttcttcagtatgtcaaattcttgcaactcagtttacttcagttttttgtttgctttttaagacagagtcttactctgtcgcccaggctggagtgcagtggcgcagtctcgcctcgctgcaacatctgcctcctgggttcaagtgattctcctgcctcagcctcctgaggagctggaattacaggcatgccccaccatgccaggctaattttttgtatttttagtagagacggggtttcaccatgttggtcaggctggtctcgaactcctgacctcgtgctccacccgtctcggcctcccaaagcgctgggattacaggcgtgagccaccacgcctggccaatttacttcagtttaattcaatttgacaatttaaaaaattgagcggttcattaccatagcactgcttgctgggaccagaattaacccctgctcattcttttcccttctctctcccttcctctcagattggaagacatgcttctctttaactgcttcttcttgtcctccttgtttccaccccggggcatgttttcttctggaacatttgtaggtcattctagccttctctaagggttcaatagtaaatgatgatggactcctggactaagtggattctcaatgtgccaagaatttacattatttggttcatacatttaacaaatatattttgaacacatactatttgctatgtcatatgggtaggacaatgattatcatgtatacaaacctctctccgtaggagcttacagtccagcggaggagccaaagaagtaaaaagagatctgcaaaatgaaagtatcacaagagaggtcaactcaagatgctatttcccatcagaacagaagtcacccttgactaaaaccacaactttaaacttggcccaacatccagtgccttgtccccaggggtgcaaatatggactggaaaggaccccaatttatctgccctgccctgaggtctgggctgggatatagcccaggtctcatctatcctgaggggccttccagatggacacatggacagccagttctggccccctgacttactcctctgtagtgaaaacagactcagtaaacacaagctgaattaaactggccaattgttgcattgattttttttttctttttagataattaaaaccctgaaaccaaggcagagtcaagcatgaataatgcaattgctactcatcttgtccaagattgccattttcaccgtcccatcctatttaaagaaagagagaactgagataagtatccctgagaaaggcttcaactaaagagctatggacagggacactctgtcacttcctgggattttgacccccagctgtccaacagaggagggtctgtgcctttgctcattagcctaacttagatgataggtgacaaactgaagtgagctatagggagttgtccacttccaggctgctatcagtataccagctggggtgtggcaaagtccagaggttcaagcctcggtttttcatcctgggtgagttcatatggctttccttttctagtcctaagcctgagaaatttctctccaaaatcttcttttagaacacagtccagattgaactgaagttgggcagagtaaaaaatgtttacttctggttgggcacagtggctcacacttgtaatcccagcactatgagaggctgaggtgggtagatcatttgaggtcaggagttcaagaccagcctggccaacatggtgaaaccccgtctctactaaaaatacaaaaaatagctgggtgtggtgacgggcgtctgtaatcccagctgcctgggaggccaaaggaggagaattgcttgagcctaggaggcggaggttgtagtgagctgagatcgcaccactgcacatcagcctggtgagagagtgagaccctgtctcaaaaaaaaaaaagaaaagaaaagaaaagaaaagaaatgttaacttctcgaagcttttggtatcagtctgaagttcaatctttctgattttcccagtgctcaggaattgcccacctccctctctcccccaggataaaatgactgagaatcaggagcaaagtggatagaagaaacaaaattgtcagaccttttaaagaggagggaaaccaagtccatttaccctaaggctttttagttgcaaatttctgctggagaataaggaaaggccttgtgttttgatatctacacttttatttgctgttaaattaccatgatccaattacacactgtatttcctaaatctgggttttgtttaggaacaggtgttaaaatgaacacttacacacatcaaatgttgttggactgtaggaattcatattattttattaatactattcagccataaaaaatgaaatcctttgcaccaacagggatggaactggaggtcattatgttaagtaaaataaaccaggcacagacagacaaataccatatgatctcattcatgtgtgggaacttaaaaagttgatttcatggaggtatggagtagaatgatggttaccaggggctggaaagggagggggaagtgaagagaggttggttaataagtacaaacacacagttaggtagaaggagtgagttccagtgttcaatagtacagtagggtgactataattaacaacaatatattatatatttcaaaacagctggaagagaatatttgaagtgttcccaacaccaataagtgataatggtggctcacgcccataatcccagcattgtgggaggccacggcaggaggatcgcttgagcctgggagtttgagacaagcctaggcaacatcgtgaaacctggtctctacaaaaaaaatacaaaaaattagtcaggcatggtggtgtgcacctgtagtctcagctacttgagaggctgaggtggggggatcacccgagcccagaaggttgaggctgcagtgagctgtgattgtgccactgcactcctgcctgggtgacagagtgagaccctgtctcaaaaaaataaaaagtaaattgaaataaaaaaattaatttaaaaatgtttttaaaaagatagatgtttgaggtgatgggtactctaaataccctgatttgatcattacatattgtatgcatatgtcaacatttacatgtacctcataaatatgtaccattattagcatcgattaaaaattttaaaataaataaattagataagacttttaaaataatgctaagtccttttatcatttattcttatagtttgccatctgaaactcttcaactaggaactagttacattagagaatgagagatcagatataaggcctcaaaacctcacatgtgcccagggcttacggagggcccaggagcaatttctacatctcttttttgtctacatgggttaatttatttgctccctgaattgttattattaaaagtaaacaaaaaggaaaaaatggcatgagcaattcctaatgaaaatcaaattagctttagtgagcccctaccattccaccattaaatggataaaatagacagacagtacaagaaaatcatgatttttatttttaatctgactaaccacagttctttagcatcctgtatgtgaaattagtatcatggttacttttcccagttggccatttggcaggggatctaaatagaaaaactaagtatggatggctaactgatcatggaatgtcaaggaatgatggatttgacttcacggtaaaaaaatacagacattcaagtttccccaaattcttcctatgtagtccactgggatagtatatcttttctgcaagtagaaagcattgaaacaaagatcccataaacaaccacctaagctgggcacggtggctcacgcctgtaatcccagcactttgggaggctgaagagggcagatcacctgaggtcaggagttcgagaccagcctgcccaacatggcgaaacccctgtctctactaaaaatacaaaaaaatagcagggtgtggtggtgggcacctgtaatcccagctactcaggaggctgaggcaggagaattgcttgaacccgggaggtggaggttgtagtgagccgagattgcgccatcacactccaacctgggcgacaagagcgaaactccgtctcaaaaaaaaaaacccacttaaatgaagtcattgtcttttcacccatttaatcaggccttcattataagatatgtgggtacaattattatttttgtgttagagataaggattctgaagtatagaaaagttaagttactggccaggcatggtgcctcatgcctgtaatcccagcactttgggaccaacatggcaaaacggcatctctactaaaaatacaaaaaattagctgggcgtggtggtgtgtgcctgtaattcccgatacctgagaggctgaggcacaagaattacttaaaaaaaaccccgagaggccaaggttgcagtgagccgagatcatgccactgcactccagcctgggcgacagagtgagactgtctccaaaaaaaaaaaaaaaaaaggaagaagaaaagttaagttacctactgaaggctcttactcccaaggccacacttttaaccactatgcaaagtgcctctccttttctctgccaagatagtgaagaaattaatagtcctcagtcctttcataagatataaaaagaaaacaaaaatagtacagcttttaaataactcttcactgtagcagttttcacaaacaggtctacttttagtataaaccagtatatataccagaatgttccaggcaagtggttttaactatttcacacttccatttctccatgttacaataagactaccagtttttacccctttcctacttcatataagtgtatgaagttgagtaatatgatgtcatcaaacatactttgagcttcttggaaaagtgatatgtaaacacaaagtagagtgtttataaaaacagtgtcaatgtggtatgtatccaatgtaaaatagatcaaattattttattagagattcggacaaaaataactctttaatcttatctattttttcatcattttgcatactgcctgtgtctgtggctttcaagggcaatctgaaagggaactaggtctgatacgtgttgattggattcgcagtttagcattctccttattgaggaaatactgcagtacccaagatcttggctgtttccaggttttggaaaaatctcaggtcaaaattgtgttgccagatgggattattacatagaggaaagttggctgtgaatttccatataccaaaggccatcctaactgtcttttatgaaggacccaacaggcttttattataattcaaaaatagccaggtcaccctaggactttttccagtgttaccaaaacatcacttttactgcccaaacggaagtaggccattacctcacagtagaaaataaaagaagctagcttgagaccaaggtagttttaaaaggcatgaaggatgagaaccaccattcttatttagtggctctggacagcgtcacttgcaaacagaactgcctcatgcacagataacaatgcctgacacccattacactttacatgcacgttcacatctgccttttggataaagggcaagaagaaaggaacatttaccattgagaaagaattagaagccttgttagtctccttttaagacttcttcacattccacatggattaactgttagggagaaaaacactgcaaaaataatcagcaatgcatttcggaggctcatcagctcccggctgacagctcacgttagttggatgaaggctgtggataggcttttagatgtgctaacctgtaattttgtttctagagtggcccaaagtggaaggagttttcactccctctcaataagccctcttgtacggttgtgacctctggcctatcataggtttttgacgataaaggagagcccgggtttttgaggttaagggagagttccctgacatctttggggtgaagaagagatggagggagcaaagctgccaaagacctcctgtgacatttccactagtatccacctataagtaagtgctggactatgattccctggggagatcagtggctctaaagacaggcccctgggctctttcctggctctgactcagcttcaaacctgccgtgcaactgctcagagtctaaatgtcttcatttatggaactgaaataatcctgctaagattactttctttgcttcgtgatgtttgcctgagaataagtagctgggactacaggcgtgtgccaccacgcccatctaatttttgtattttttgcagagacagggtctcaccttgttacccaggctggtctcgaactcctgggcttaagcaatctgcccactttggcttcccaaagttctgggattacaggtgtgaaccatcacactcggctaaaatgttttgaaaaatggaaacattgtacaaatgtgagatgttgtgcaacatgtcactgaaacacggtggtataagagaagttttgggaaccagcagaccagaattaggcctgagaaaatcttacagtaagcagaccagaattaggccgtctgagaaaatcttacagtaagcagaccagaattaggcctgtctgacaaaatcttacagtaagcaggccatcttcccaggccttctcttttctccagataatgaagaaggctttttaaaagcaaagccaacttgatttgttaattgatcatccaacttcttaactgtctttttctcatggtaaaataccgagaacattgtgggtgaggagcaagtcgggaggtggaacccacccccgcaccctgcctccaatagattgtatgtgtgggtcgctattgctgggacccacgaaggctgtggattgaggacacagggtagaagtgggatcttctgcaggtcagtgtcagatgtgtctgtgtgatgtagtcatgggagaggcgcgagtcttgggcgggtgtatcttaggggtgtggaagtgtctgcaagggcctccgtggtatgtcatcacattatttatatcatgggcatgaccctgaacgttcacccgagagtggtgagagaaaggccaggatttaaatcagtcttgacagcgcagatgaagtttgttattgttttccgcccttcccgagggacttcggaaatggccccctgagaggtgaattcttggaaagaatatgagggcggttaaggcgtctctgtctcaaactctccggattttttgcagctaccagggactgcgagggtctgcgtcctgggtggaaggaagcggcgtcagtcaacttcctcgcagcggcggcagcggcgcgggctgcagcggagcgcgcgggtctgcgcatcccgcccccgggtcgggaaggggcggagctgggcgtcacccgcccccggcggtctcctcctcccggccgctcccccgagccgagcccgccgcggtcacagccacccgcgggaagctcgtggccgggaccccgaggcgggagcgcgggctgggccgggctgggctacgcgcacgggctcggccgccgcccctgccggtgagtcccgccgcgggaggcgcggaacgggtcgagttgggtattgggaccgcgaggtcggggagccccggggcccgagctcgggaggcggggacgtcaggatcgcggcgttggggagtcctcgcaccccgagctcagaggggaggtccagagtcgcagcgttgggaacctgaggccaggggccggagtttagggccccgatgttgagtctccgaatccaagcccggaaggggggacgacgggttaggatgctggggagccctggagctctgaacggctgtagtggggtggccaggactgcgatgctggggagtcatggagcctgagcctggagagctggcgggggtgtggggaccgcgatgttgggaaggctgagcccggagggcgggagattcaggaccaagacgtgggggagtccgacagggcagaacgaggggcgtcctgtccgcatttgtggggcgccctccgcagggcggaggggaacggaacctgggaggggagtgcggaggagaggaagcccggggcggtagggagagcccgaggaagggcagcccgaggtaggggaaccccggaaagagtagggtgggtctaggcatgtgctttcgccggggaaagatggagggggcttctctgagagggtgggcgcgaggagcggagttgtgatgggaaccgccggcagctggctaatgggcggatgctggggcttggctggatgggaacgccgcggtggggtgtcggaggtggctggtggggctggaacgctgggaacgtctgtctaggctatgggaacgcagcgccctcggtggaacagggtcgtagataactcgagagggaatctagtctagggagcaagaccgggcatccccagacggaggcgggtggggacctcgcactcagcgcgcttggggaatattcggagcctgggtttgggggctgctgcaccttgccgacccggtgcggggacctggaggtagccgggcacagcagcttcctgtgcagctgtgggtgctccaggcactggcagactagtgggaagtccaggagccttggcaggctcattgtcttgacctaagttgcattccatatttcttagctgggttagaaatgattttgtccaggaacccaatgagaagagcctgggctaaaaaaattagttatggagtgagatttcaaatgtacaggtaatacctacccgtgtgtgtgcgcgccttagggataactcatacaatacactgtatgtgtgatttttagacccacgtgtgtactacttgttccagtactctgagaagctgtttctgggtaaaaacgaggaaaatccacaacaaatacacacaccaaacaatgtccacaaacgcactgcattccagtcgagttaaacatgagagtattgtacagtttgggagtatttgcttgtcagtgaagactcctgttactgaagttaataggagttgcctgcatggaaggtagactgcccttgactgccctgttaaggttatccacaacgtgtacccagccctgagctgctgcacccttgaccaggtcaactggaagggagccagactgcttaggacctcagtggatgagtatccaagtgtgtatctaaaaacaaaggaccaaggcatggctttgtttttgtttttgtttttgttttttatttctgctgtttgtccttgggtgcgtgtccttcaattattagttaaatgttgactatcttacattaacccatcttgtattgttaattatgtatggtaattatttcagttatttggcgtaacaaccaattctggaagacccagagtagaggaatcttattaagtggatatatccattgaaagatatgtttttttttttttttttttgcgggtgtgtgtatgcaccagatttccttctggtgcatataggtccatcttctgacacacactgagatttgagcttcattggataaacaaggattattttggcaactagcatttgttgggtctgtttttaattcatgaaaaggaaatctttaataattatgcaagttaacaggatagaaagcgatttattcattttacaagaatcatttcaggataagcatatttccattaagggtgtgtgtataccttattgagtggtcaggaccttgcatcaaaatctgcactatcattcctgcagcagtgtacttattcacttggacgtaacacttgctgatgcttccaattctttatccaaatgttaaaataaatatgccagtatttatacattcaaatcagtatttctccccttcaaaagcctgctcttggcaagctgtgtactaattctagtgatgctgtcactactgagaataattttggagctcctgctttggagttgccttccgagtttgcaacacatttcctgattgcctcagtggtggcaaaccttcctcagctgggaaacagccaggcactgtgcggggccaacttgggcttccgaggtggggaatcgaggttgtcaataagtatgctcattaaagtaatgaaaattctcttgaaggactggcagttctaaaaggggcatttagtaatggcatggagtatgtatttaggattggaaggaattacagttggtccctgaacaacaccggggttaggggctcccatcatctccacagtggaaattttgagtacaacatttaactcctcaaaaacttaactactttgaagcacaaccttcattttggtgtttatgctctggtatgtatgtaaagtaattggtcctgtcactttattgttatagcttatggcttattgggctagaaaaagtaagcctttctttgcccctcctgatacttgttactaggcagtctctgtcattgtggatttttacagaaagcaaaacaaaaatacaaaagacttgttgtctcaccaaaaaaaaaaaggtacccagaaagccatttgccccagctgtaggtaatgcctggtgcttgatttttgatgtgaaaggatccacagaagtaaagggaagagaatgatttctgaacattcatttcaactttgggatttcatggcacacagtaaaaaatgtactgaacatatccctttttaaaattcgcattttttttttcaggttgtgttgcataaagcttcatacagccacagcttgaatcttgatctagctgtggtttggggcaagttgtttcatctcttttggcctcagttttcttaaaatgaagatattaatgagtatgtacctcatggggctgtgatgaagatgaaataacattgatgcgtgtagaacacttgagttcggtgccggacacatcatgagtgctcaacagagtctacttattcttgttaggaatattatttattgatagtcttatgttaaaattcctttgaagccatgtggaaatttatcatttcccaggtaatgatattcccttcagttaggttttgcaactaactacaaatagaacattttggtttttgccctcctggtcttttaagagtttttaaagggtaacctgaaaagcaacgacaattagttattttttatttattcagaaacgaggaaatacagactccaaataagtggagtcagtgctcccagttactttcttttgaattcagattttttttttaaatgagcattcctgttatgattgtatattatgtataacagtttggtgtggtaaggcaaatctgaaagaaaaaagtttaaaagcctcttctctaatttttttcccttcatccaatgaaaatattattctaacgaaacagctacagttctcttggcacgtattgaaagagacgattctggtaaacattcccttcattccaaatgtgagttttgctctgctgtgttttttaaacaatagggaagaatagcctggcactgaaatctcagctcttctgtaaatgtcaacactagttttttttcaagtttataaattttattttatatatatatgtacatatattagaaagatgggaaagtttcatcttaattttaatcagatgattaggggctgctatgaaatagttaatgtttcatgaaatgttgaccatttagtgagaattctctgttctaggcaagcaagtgctggagatggagaggcttgagacacaggctttgcccttcagaagttcattcacatcatgtgctctcttacaatgatgcaggaacaaaagcttcttctcctaatggcctgtggagctaagaattcatatggattttactacatgatattttccttcagtttctcaaagaagggtaaataggtggatctctcaatagtgttcatatttttgaggtggattaactctttcaaaattagatcccaatatgtactcagaggccataaaaggagaaaatagctataattagtgaattacaaagtatatctgcaggatggggtggtattattgctatacgaaactttcctggaatgttgtgtttggttcttgctctgtcttctgagtagcggtttatgtacttgtaaaggaccaggaaacaatatacattgtggcttagactggagccatgattcttttttttttgagatgaagtctccctctgtcacccaggctggagtgcaatggcgcaatctcggctcactgcaacctccatctcctgggttcaagcaattatcctgcctcagcctcctgagtagctgggattgcaggcgcgcaccaccacacccagctaatttttgtatttttgtaatttttgaccaccatgttggtcaggctggtctcgaactcctgacctcgtgatctgcccatcttggcctcccaaagtgctgggattacaggcgtaaaccactgtgcccagcctggagctgtgattcttaatggggagaagtgggtggtgaatttgcccctttcccccagaggatgaaatttggtggtgtctggagacatttttgattgtcatacctggagggggagggatgttactggcatctaatgagtggagtccagagatgctgctaaccatcctaaaatgcacaggacagccccgcacaacaaacagttatctggttcaaaacatcagtagtgctgagaagcccttggctagagcgtgggatttggagtaaaaataaacctgcattagcaccctgacaccaccatttcttaactgtgccaccctgggtgtgttacttaatctgagtatccataggatgcatatctgaagagatgtgagttagagtgtgtatgaaatgcttaacacacagaaggatcgcaataagtgtcaactcttagtatcatgactggtagatctaggtcaaaatccaaagactgtgctttaaacagacacagcttttgtttcttaacctattatgtacagaaagaattcaggtttcttgttttcatttgtgtgcccaaggatagggcaggggcacagatgtagggcctccagcgtctctggtaccttctgcattttgtcctaggttctgccagacagctaagtgtactctgcagatcaaccacgcaaacaggacagtcccccagacttgtgtagaggaaagatgaggatggaggagctttctgttccatgtgggctacacttggaagggggagatagccaggccaggaagctccttctgattgaacttattatctcccaggcttctgaaggctcttctcagacccttgtctagacatgaccagagagtttcctttgctgtgtgagcaggtgaggaggtctggccatttccctcccctttgcttttctttagccaggtatggtgattcatgcctgtaatcccagcactttgggaagctgagatgggaagatcgcttgagccccaggagttcaagaccagcctgggcaacatggcaagaccccatctctacaaaatatacaaaaaatagccaggtgtggtggcacgtgcctgtagtcccaactacttgggacgtgcacacacacacacacgagccacatgagtgagtaatcaactcagtaacaagcagatcttcagcaaacgggcaagtggagcaaattctgggcacagagaatgtttagcagataaggatgtaaataagtaacagtgttttcttagctgtgatctagaaaccattggtactgtggttctcagtcctggctataggatagaatcacctggggttgtccaagaatattgatgccctagccccaccccagaccattgtttgcgagtcaaggtgagtagcacctgggtatcagatttttttaatttttgggtgtgagttgagggtcaaggaccactgccgtgtgaaatgcatgacttgtatttaaaaaaaaagaagaaaagggaattaaaaatatctaagtaacgtaagtgttgttaaacttttgtttagtcttgggtatatgttggcttctaattggttgtggtcaaagtttgaaaaacattgttttagaaccttagaggtgtttaattaatactgataaatttacctcattcaatatttctgtgtgcacatctgctggacagttttcaaagtagttttatatatcttctcaaatatgacttttgctaccatcccatgaggcataaagagcaaatatactgatttttttttaacagatgaagagtgatatggtttagctctgtgtctcccacccaaatctcaccttgaattgtataatccccacgtgtcaagggcgggaccaggtggaaataattaaatcatgggggcagttttccccatgctgttctcatgatagtgagtgagttctctcgagatctgatggttttttaaggggcttctcccattgcttggcactcattctctctcctgagagaaagatttttcttttctcaatgtcttggagggtataggcttccaaaccatctgggtggcaaataaactgttcatattttcctatgtgaggaatattcaataccatatcagagcaatattttttgaatgagcaaataataattatgataaatgttaatatacaatggaggtaataggtgacttcaaaatttcaagacaagtacacctagggaagacccaaggctggttcacctctctttccagggtgacctggttcctgactttaatcaaccctcagttcctagggctgtaagaatttgagaaagaccagagctagggttattgatttaagagctttttgttgattttgagacacagctaacagtagaggtggtgacatttatccttttcaggtccaagattaaaaggagcaaagaagaagaaaaaaatctctattctcaaagaatagagaattgagtactttccaacaatattgtgaaactctgtatttgccctgtccttaacacctgctcttttgactccaagagaataccaaaaggttcaaaataaatccgtagtcaggaaactggaggtgagctacaaaaccaggcgaagatggacataaaatatacatactctgctgaataatgtctatggatcataattttgggagaaatgactgttggtgaaaactataaagagaatttggtaaatctgtataaaatatggaagagcagatagtatatagtcagtgatggagtttaatggctctcaaattagaaaatttatattttccatggtgaattcattccagaaatcccatcttagcttttttattcctgcacttaagcaagataaagtcattactattattcccttgagttgtcagagaccctgagtactttagaaagtggaattagtttcatgggctaatactcaattgcctgcagtgctaaaatgttacccagataggttcaagaatgtcactgaaaccaggtggcatttcaagaaagtagaaactgattccgcaaatcttggtttgatgaagaggttcatgttaattcatgaagtgctaaaggtatttcttggattgcatgggtttttttttttcccctctttaaaatatactgaataatgacttgtttatgacttatatctctggaactattgccaccttctgagaagctgctggtctgagggtctcagacaatgtctttgtctcatctgggatgtaaatatcttagattcttgtaggtctcaagaatcagtctaactcggacacttgggagggagagggagaaaaaggcaatagatgttgttggggcataaatgaaataaggccagagcggcagaggtggggttcaaataggatatttgtcagttcatttacagggatatttttggccacttaataagtacccaacactgctagattccttgagagatgtaagagaagcgtaaagcacgtctttttgtgcttaaggagcctaatacatttggagtgtctgctttttttttccatgaaggagaaaactttagaacgtttataattgtgtgtaggactctgaggcactggtagtaggtgcagtacccctcagtgtgagacagggtaaagtcagtgggagctcttacagtttgagtgtaattcaggagaaacaacctgagtgagatcttgaaagaagaagaatatccaaagagggggacatttatgatgggagacatagcttctgcaatggcacagaggcaaaaatcagaatagtatatggtatgtaaggccctgaggaaatcactttatttggcttcatttttcttcgtatcacttggcaccacttcacatgtatgtgtgtgtgtgtttactccctatcttctgcattggattgcagtggtcagctacataaggaatacatagagcaggacctcagatctagattcccttttgcaattgggtgtttgcagaaaggaaaaaattaaatcactcattgaaaaatatttttcaagggtctactttactatatgcttggttggcagatttctaggtacaggagataacagagatgaacaaggtccctgccttcatgcaacatatattctcttgggggagacaaacaataaacaagtaaatcaggaaatgtatgattttaggtagtgaaaaatgctatgaggaaaaataaatcaggataaggggaaagagagtgccagttttaggtaagggtaaggtaagggtaaaattttagattagctcgcttttagcttccctagagaagccaaagaccactgaagtctttgctaatggagttccagctttattatatgctcatcttgtccagtgaccctctcaacaatatatgtacagtggacattcagcaagtatttcataatagtaataacaatggtcttgctagacttgaattggagcactttttttctcctttttactgtctataaaagaagcatgaatagaagaattcttctattacagaagaagcatgaattgcataggagaggacacacaggtactgttgacaataacacagtgatccatacatccatctctgtggaaaagaagattgaacacagctgcatcaaaatgtaaaagaaaatattaaactctttataattatgtggctgtgatacatctcatggcctagagaaccattgggtctaaatattaaccaaattccaaaggaggtaataatatatccatgcatatgtaaaagcatacaaagacataaaatagctaccatgtattgagcaatcactgtgtgccaggcattgtgcaatgtactttacttgcattacctttggtccctgcaacaaccttaggagggagatatcccagtacaaatgaaacagagatgaagtggctagtgcaagggctcttaaagttagtgtcagagcaaagatggcagatgccttgtttgtgtgggggcatgaaatcgtgtttggaaatgctggtttaattaagggattccttggagtgcatatctagcttggcattactccagggtggagttccctgtctgtccagctcagcactctatctaagaaatcctagaagctgggaatttctggggctggctctgaattgatgtaagtggtttcctgaacccactggaggcatggagtgcattgaacattttttcactattttgtatgcctgtgaaaccacatacatgtctgtcaggcagctgcacgagccattaaaacttggaaatgcttagcttttggctggaaatgacagtagctcagtttggagccactaccagctcaactaaagctgactcggaactctgattctgtatatctgtaaaagatctaggtaatgaatattggaaggatgtgagatttagtaaacttccaaagcatagagaaccaataatgatcaacttattgttactgatagtgaaaaggttgggcagtagtggatgatctagagtgacagtgaagttctccatgtgtttaactccctcatgttggccccagaacccacccatgtttctagagaggcaggctggtctcttggcacctctgtgacctggaaacaatgccctcaaaacctctgatctacaacagattacatttaatgagcacatgtgtgctaagagttttacatgtatttctctctctctttctttctctctctctcttaaactttctgttattgaaatttcaaacaggcagaggtagacaatatggtataataaatccccatgtgcccatcaaccaatttcagtaattattagctcatggccaactccatatatatatatatatatatggatatatatatatatatcttcagattattttaaagcaaatcccagacatcatattatttgtgaacattctaaaatgtgtttccaaaaggtaaggacccttttattataattctttaaacttcacaataacactgttagatatcactatatccctatttgacagatgaaggctctgagacacaaggagtttaaattacttgcccctggtcacccaacttgtaactgacggagtcaggattcaaatccaagttgcctaactccaaagcccatcttgtttactgccatgctacatggttgctaccagaccccactgttgtagctaatccttgcattacagaattggatcctgggattaacaaactcccacggacatgactgttgatttctatgaattcaaccattttcccattgctgcaaattgggttcatttaggtacacagggacagaatagctgtgaaaggcccgtctgaaagaaagaaaggaccagcctgaaatattaatggattctattagggcagcaaaactgataaagcagtcaaacccttcttgtgatagtgttttaaatcttggagaaatccacaatgaaaaggacttaatagaaaatacgactgtcattgggccatagctgccaagggaactaaaaggtttcttttaaatgaattctcctttggttttctcttggcggaaggaatcagccgtcccactgagtcttttcagtttgtttctagcacagctaattgtgtttatttgtctccggaatcacatgcctctctcctctcccttgctttttcttagggtctcttgcctgctgtgtactgcttttactgccagaaatgttctcctcacctgggagccagttggctgccaacactgagtaggtactgggaggctgattctgcctctccagagatctgacctggcctgggtgtccaagattgccttagggtagagggagagattggataagctggctacaaaaggatctgttttttttttttttcctcagatgtgtccacttggtccataacagcattaagaacagagcagacagcaagtaaataaatcgtattgactaattgatcaagatagctttgctagttgatacggtttagatctgtgtctccacccaaatctcatgttcagttataatccccagtgttggaagtggggcatggtgactagatcatgggggcagtttctcatggcttcacatcatccccattgaagttgtcatcctgatggttctcatgagatctggttgtctaaaagtatgtgacacctccccactccctctcttactcctgttccagcattgtgaagtacttgctccccctttgccttctgccatgattgtaaccttcctgaggcctccccagaaagtgggcagatgccagcatcatgcttcctgtacagcctgcagaaccgtggccaattaaacctctttgctttgtaaattacccagtgtccagtatttctttataacaatgagagaatgggctaatacactagtcaagttcaagaaactttggttctccatttttcctatcaaaacatcacattgactttcctgcttaatagtttcctttgtcattgggatcactgcactgatatttactcgcttctttcctcctcctcccctccctcttttcgttttgtttcgtttctttcatttcttcttttgacagggtcttactctgttgcccaggctgtaagtacagtggtgtaatcatagctcactgtgaccttgagcacctgggctcaagtgatcctcttgtttcagccttgttattaggtaggattacagtcacataccacgatgcccagctaattttttgcagggtcttgctatgttggtgcccaggttggtcttgaactcctgggctcaagccattctcctgccttggcctcataaagtgctgggattataggtatgagcctataggtatttgcttgattcctaaacctctgtttccttttcttcccccttacctgtcctgtcccatcacagaagccatataactgctggagaacttcctagctctttttttaaccatcttactcatagagttctagaagatggtagttgtcaggatgcaattgaagaaaagcctagaaattccacctttggctctctatgggacatgccaaggaggacctcattattattagagataataattaatataatattatattaatataataatattagagataatgagggaaatacattttcagggacaatgtattttatttaaagatatgttattgcaaatattttgaaatagttttttattattgatatgatcactactttttaaaaacgtttagtgggaaaaacagtagacgacaagtcacttagttgtctatagtagagtcagctcgggggtggcaaatatatggctctgtgccactgttccctcctgagccccacctccctcaagagcttgtggcagacattgtaaatccataacaccttgccctctaaactccagtccaggcctggaatgctgctcaacacgtgatttcaggaagccattaccaagcaatagaggttggcatgacaagtgaaatctatttgccatctcctaaataagtagtctataaagcccttcctgcactaaaattcagtgagctctttagcctgtggtcatattaggtccctaacagctagggagcagatctcctcattcattgacattaccacatagatgccaaaccctctctggaaaacagaagagaaagcaaaatttttttgattaatttttttttaagatgcagggtctcactctgtcacctaggttggagtgcaatggtgtgatctgatcatagcttactacagcctcccctcctgggctcaagtgatcctccctcctcagcctcccaagtacttgggactacaggtgcatggcaccactcctggctaatttttatgtatttatttatttattcttttgtagagacagggtctgtgttgcccaagctggtcttgagctcctgggctcaagtgatcctactgccttggccttccaaagcactaggattacaggtatgagccaccatgcctggctgggatgctttaaacactgatggttcatggaagatttggaagttgcaactctccctttgcaacttatagtaggtccttcagtggtttgtcagtaagactaaatcaaatcattcttaaggaagaaaaatgctaatgcagtgctgaaggggaagaaaaggaattgaaacccagagcctgtcctgttcctactctggtatagcagttgtattaaactgaatctagattatgtgtagtttaatgagatgggaaagcaaaaaacttagtgcctggttataactaacttgctgtcacatagtagttctcttttgaagaaatttggagagtattaagataatgcatatgaagcatcaagacttccttggtgaggttttaagtgttcatgaccatattttagacaatgtattggacagcagtaatggcttaggccagtccgtagtcaccaaaatcattgtgagctggtaggctatgcaggcagaagctgtgtgggctgctccaggcctgcctgtctctaagaggcttgacagaggatgccaggctgctttctgggtggttaagatcagactgtgtatgcactggtgtggttttctcttgttttaatcaacagtacattcttttgcaaggaaaagacaaactgaggctcattttggaatgctctgatttcagagcaaggacaggcagagatacttttccattttggaagtctcaactgaatattggatatggggtgaggaaaagcaggaagaaaaacccatataggttagacaaaatattagattagccaagtatttttaaagtattttctaaaaattagataagatttagagcttacccccaccccattaattgtatacttttgtctagtgatgcgtatgtaaaaatcatacttaagctgaaatcacttctggcttactgttgttctttattttctgcatctttttggatgtcatataaaaagaggccccccaaatcatcatttgcttgttatttgggaatgcgaaagtaattgaattctctggagggatgagtggtggttgaggctgaaatagcaagttgggaatgaatgcaacttttcagtagatactataatcctttgtcaaagggagtgctggggtgatggaaatgaaactgcaagtgctgaccttgaatttctggtaacattgagtgcttgtctcttcccagcccatgtgatctatggacttgcccaaatagcttcttgctggtactgtatcctctgttttctaaaggcaccttagggacttcaaaaggcacacttttgctttaaaatgcatcgtattttaatgttaactcgatggtaaacttatataatattggctgttagacactgaataagcttaaaatggaaaagtgacactttctcgacctgcattcatcttactccttgtaattgcattcattttttttcaactttaattcagaaatcttaagtagttggcctttattattattttcagtttacggcattattggtaccagaaggattgtggtttattttaagtatatgattcatttaatctgatgggactcaggcttggactgtctgctttccagcccactttgcctccaagatcaatgcaacctcaaagaaggaaagttttaagttttttaatggtgtttatgattgatgtaccttgttgatattaataactgtatctgctacattatagctttgattaatcacagtcttcaagtaaactgacttgctgacatattccactttagagaaaaaaatatcaaaacacaggaaaatcaaatgctattaggacttttgtttaagagcaatttcgcagggagaacatccttgggacttgtttaagaagcaacttcccaaaagcctaggaagttttgtttaagagcaaaacttaaaggggaaacttagttttggttaagagcaaaacttaaaggggaaacttaacttcccctttaagttttgctcttaaccaaaacttcctaggcttaccatagacacagtcctatcttcttcgcattggtatctctattagccaaactttatatggaaagagataaaggacctggacaaaattatgttcacttacacatttaggaaagtggactaatacattggtagaatgatttccaataaacgaggttgaaacagaaagcatttcctgaatagcataaaagtttagggtgtgggctctggagccagactacctgggcacagattctggctccaccacttcctgtctggattttgggcaagggacttcacctgtttcctcatctgtacaatagctaaaaatagtagattccatttcatagagttgagaggagtaaatgttttatttatttaagtcacatgcaatgaccttagaaccatgtgtagtagagagtaagtgctcaatatatgtaagtcattttagtaattatcactggcaactggataaagaacagtaacagtgaagaagaaatgctatatctctggtttctggcttgagcacctgggtgcagccatttactgagataggaacaagaagcacaggacagaagtagggttagtggaagaagcttgattctcttttggtagtgttcatttgaggtatctttgttacagctaagcagagttatcaagtgggcatcaaatataccccattccagatataacaaaattttgtggaatattattcaaccttaaaaaggaagaaaattggccaggcgcggtggctgaggcctgtaatcccagcactttgggaggccgaggcgggcggatcacgaggtcaggagttcaagaccagcctgaccaacatgatgaaaccctgtctctactaaaaatacaaaaattagctgggcgtggtggtgtatgcctgaaatcccagctacttgggaggctgaggcaggagaatcacttgaacctgggaggtggaggttgcagtgagccgagattgggcctctgcactccagcctgggcgacagagcaagattctgtctaaaaaaaaagggggggaagaaaattgaccaggcatggtggcttaaacctgtaatcccagcactttgggaggctgaggtgggtggatcacctgaggtcaggagttcgagaccagcctaactgatatggtgaaaccccttctctactaaaaatacaaaaattagccaggcatggtggtgggcgcctgtagtcccagctactcgggaagctgagacaggagaattgcttgcacgtgggaggcagagattgcagtgagccaagatcgtgccactgcactccagcctgagtgacaaagcaatactctttatcaaaaaaaaaaaaaaaaaaaaaggaaattctggcacatgctatgacatggatgacccttggggatattatgctaagcaaaataagccagtcacaaaaggaaagcactgtatgattccacttatataacggacctagagtagtgttctctgaattcatagagacggaaagtagaatggcggttgccaggggattgggaagagggagccatggggagttgtttaatggatacagagtttcagttttgcaagatgaaaagagttctggagatcggttgcacaacactgtgaattgatttaacactactgaactgtacacttaaaatggtaagatggtaaattttatgttaggtattttactttatttttattttttgagacagagtctcgctctgttgcctaggctggagtgcagtgtcgcgatctcgactcactgcaacctccgcctcctgggttcaagtgattttcctgcctcagcctcccgaatagctgggattacaggtgcgtaccgccacacccagctttcttttttttcttttttttttttttttgagatggagtctcgctctgtcccccaggctggagtgcagtgctgcgatctcggctcactgcgagctccgcctcccgggttcacgccattctcctgcttcagcctccgaagtagctgggactataggcgcctgctaccgcgcccggctaatttttttgtatttttagtacagatggggtttcaccgtgttagccaggatggtctcgatctgctgacctcgtgatccgcctgtctcggcctcccaaagtgctgggattacaggcgtgagccaccgcacctggccgctattttgtatttttaagagatggggtttcaccatgttggccaggctggtcttcaactcctgacctcatgagatccacctgccttggcctcccaaagtgctgggattacaggcgtgagccacccgacccggcctggatttttttaaagtgtgagcagaaaataacatgttaagtcacaaggtgataagtagtactatggaaaacaaagaaaaagtagagcagagttaggtgttgtggaatgccagggagagtagaaatgcagtattaaatcaatagggtggttgggaagcctccttgaagaggtgagatttgagcaaagactggaaggagttgtttgtctcttggctactattaaaatctgtgtctaaatctgccagggtccacccgtggtatggcaatgctcagtcaataatcaagctgtgtatatcttttaaagtacatattcgtgggcagctgtggacgtggacatttcaactcatttggaaaaacaatccaggcagtcaggtagcacttcacagattataatcagatatcatctgagacttgaggttatgttacagtaaggacaaatggttattcttatatgtggccttttctaaaatcaacctataacctagaaacaaacaccaagggtttgatttctttagttattccaaaatttgcatgttgttgtttgtcctgagaagttgcggtgccttgggagctgagaaaacgtacatttttcaatatgagttttaaacgccttcattaagactaggattttccaggcttcaactgaccttcctgtcaacttaaagagggcagcttaaaaatccttacttcatgtattctttatttgatggatcatatggcatggaatggtgagctgcttataaaaatcctgtgacctggacatgttttattacaaatttatgaggctggtataaacaggtatcaacttgctatcatttaagccaatactttgtactcacgaacaaactgaaagaggtttgcatccttggatacttgaactgatttttccacatataatttcttaacctcatttttctaggtctaataaaaagaagtatactgagcataaatctctactttggaacaggaaaaaatctcccccaccctcctcctcccactgaactttgtggggaaattaatatctatggatggacaggcacctttgcttttccccaatcctgtcttctggtcaagaattctaaagctacaacactagcagcaactcagaacacacatggctgtttgtaactctcttgccaggccacatttatagaataattgctaaggtgacaggaactaggtgggggaagaggaaacggattctctctctaagtcctttctacactaatggcaacaagcattggtggattcaaaaagcacagcaatggctgggtgcggtggctcgggcctgtaggccctatactttgggaggccaaggcgggtggaatgattgagcccaggagttcaagatcagcctggtcaacatggtgaaaccccagctctacaaaaagtataaaaattagtcaggtgtggtggtaagtgcctgtagtctcaactactcaggaggctgaggtgggagaatagcttgagcccagaggttgaggctgcagtgagctatgactgtgccactgcactccagcctgggtgagatcttatctcaaaagaaaagaaaaaaagcacagcaccaatctcagaaattgccccctactccaatttttgttaacattcttatccacccaatgtttgatttcttttagttctgaacacaattcttataaaattactggcataaatgtaatattttgggtgatttaacaagaaaggaggagaaatattttcctttatctttatgcatacacagctctctatgggcatttagcctcagctggttgttgagctcagggtataccctaaacatttagtttctcccacatacattagagagccccatgaaaatacataaataataacacatgagaatgtagcagccattaggtgtatattattgtcataagatatatatcattagataatgatagcagtacttggtagcaaaaggagagtttagtggattcaacagatgtttgttgaggggccactctggcaaaaatctgtgctagggtctaagcagggaggtaccatacaacacaatacttgcccataagaaacttatggcctacttgggaatactcaggtaactacagaacaaggttgtatatggtagcatcatttaagtgatacaaactggaggatgcaggagaatggatggaagaagatattgctttgaccaggtgagttggaagtcatggaagaattggcatgtgagaagtgccttcagggacagataaggttttctgacaggaagctattccaggtaaagggaacaacctgggcaaaagtctataaaggaatccccttctagtcatatacatatccaataagacatgggcaagactagactgcagcctagggtgtcggagcaaatcactagaaacaacctccatgtccatccacaggaggatgaactaaagaattgtggtatattcatacagtggaagtagtcagcaaagaaaatgagtcaactagagaatagcaactaatgtggaaaaacacaaacgtagattaaatgaaagaagaatgttaggtacaaaatttgtatcaaggttaaaaatatccaaaaaaatcttatttataaatttcatgtggttttattgtatcattatatgtagatataactataatttcaaaatgttttcatgtgaaaacagtgggaatgaaaaccacccacaatgcatagagactgccagtggggagggtgggaagggaatgggtagacataggaagctacgtttcagttgaatccatttttttttaagacagggtctcactctgtcacccagactagaatgcggtgtcactatcatggctcactgcagcctcaatctcccaggagcaagcagtcctcccccttagctggggccacaggcacatactaccatgctcagctaattttctaaaagttattttgtagaaacaggatctccctatgttgcccaggctggtctcaaactcctgggttcaagtgatcagcctcccaaagtgttgggattattggtgtgagccactatgcccaggtaattgtatctgctttagagagaagaggacaaacagatagatacactaatatatttatagacacatataaacacatatactatgtacatatctattttaagatctaaagtagacatcacgttaacgtgataaatgttacgttattctctacactcttctacatacttgaaatatttcataatataaaaatgaaggagaaagtcacagttcaggtttaggaatagcaaatggtatagaacagtgattctcaaaccttaacatgacccttggcaagaaatacattttattttagaaaccaggaattcggccgggcgcggtggctcacgcctgtaatcccagcactttgggaggccgaggcgggcggatcacgaggtcaggagatcgagaccatcccggctaaaacggtgaaaccccgtctctactaaaaatacaaaaaattagccgggcgtggtggcgggcgcctgtagtcccagctacttgggaggctgaggcaggagaatggcgtgaatccgggaggcggagcttgcagtgagccgagatcccgccactgcactccagcctgggcgacagagcgagactccgtctcaaaaaaaaaaaaaaaaccaggaattccatgacagtacttatccttaatatactggatgtactctaacatgttaatatttgctcttttattctgcatgatatcaagcagtggttgatgcttacagatgcagataaaggctaggtcctggaaggctttgacggtcaggctcaggaatgtaagctttagttggcaaagaggaaaggcccactggtggctttggggcatgttatgtgagctaaactttagctaaatcaaaaaaggtggaactgaggccagagattggatgatccaaaatcagtcaggaggttatcaccattagtgtaactggaacagggtatgggtctgcaggggaagtgaaaaaaagggacaggttttgcatttgctgtgattaaaaataatacagataatatggatttgatgactggggtttcagggaagcgggagggaaatgagacaaatttcactcttgatttcaaggcttgatgcctgagagattggttacatcaataacaactatgtatatcaggagaaatttggttttaaacactatgtttaaggtgctgatggggacatctacacatacgtagtgaagccatggctgaggttaaaaggaatgcataatggtttcacaatgtactatggctttctatagcagtacacagtacctggtgagggaaaaaatgaaaggtgtaatcaaggtggggccaggcaggcagacctagcaaaggtgtggcgggtggagggtgaggagtgctggttagggcagagtgaaatggctagcactgggttgggtttgtattgggatggcagtgagtccaaatgcaatgggtcactgagagaagaagagttgagagactagaggttatgagacaccaaaaagtatctttagcaggtgtgatgaaatattacaggtggaagttaggagtgttgtaatcaaggaggaggaatttcaaacctgaaatcttggagctaaaataattctaagttagaaaaaaaatactattctgaaattcatatggaaacaaagagcctaaatagtgaaagcaatcctaagcaaaaggaacaaagccagaggcatcacattacccaacttcaaaatactacaaggctatagtaaccaaaaggctacagtagcatggtactggtacaaaaaaagacacacagaccaatggaatagagaacccagaaataaagctgcacgcctacaatcaactgatctttgataaagttgacaaaaataaacaatggggaaaggatatcctattcaataaatggtgctgggaaaactggccaaccatatgcagaagaatgaaactggtctcctacctatcaccatatacaaaaattaactcacaatggattaaagacttaaatgtatgatatggtttggctgtgtccccacccaatctcatcttgaattgtagctcctataatgcctacgtgttgtgggagggacccgttgggagataattggatcatgggggcagtgtcccccatactgttctcgtggtagtgaataagtctcacaagatctcatggttttattaggggaaacccctttcacttgagagggggaaacccctctcattctctctctactggctgccatataagacatcccttttctcttccatcgtcttctgccatgattgtgaggcctctccagccatgtggaactgtgagtcagttaaacctctttactttataaattacctagtctcaggtatgtctttgtcagcagcatgaaaatagactaatacaatgtaagacctcaaactataaacatccttcaagaaaatctaggaagtacccttctcgacataggccttggggaagatttataactaagtcctcaaaagcatctgcaacaaaaacaaaaaattgacaagtgagacctaattaaactaaagagcttctgcaaagcaaaaggaaaactattggccatgcaccatggcgtatgtctggaattctagcactttggggggcaaggtgggtagattgcctgagcccaggagtttgagaccagcctgggcaacatggtgaaaccccactctctacaaaaaaatacaaaaaattagctgggcatctggtgtgcgcaggtagtcccagctacttgagaggctgaagtgggaggatcacctgagcctggaaaggttgaggctacagtgagccatgatcacaccactgctctccagtctaggtgacagagtgagaccctgtctcaaaacaaaaaagaaactttcaacagaggaaacagacaacctacagaatgggagaaaatattcatacattatgcaggggtctaatatccagcatctataaggaactttaaatcaccaagcaaaaaacaactcaattaaaaagtgggcaaaggaaatgagcagacacttctcaaaagaagacagacaagtggccaaaaacatatgaaaaaatgctcaacatcactaatcattagagaaatgcaaatcaaaactacaaccagatactatctcacaccagtcagaatggctattatttaaattaaaaaaaataacaggtgttggtgaggctgcagaggttagggaacgtttatacagtgttggtgagaatgtaaattaatttcagccactgaagaaagcagtttggagatttctcagagaaccaaacacaactaccatttgacctagcaaccacattactgggtatgtactcaaaggaaaacaaattgttctaccaaaaagacacatgtactcatatgttcatcacagcactattcaaaaatagcaaagatcaacctaggaatgaacctcagtgcccatcaacagtgaattgaataaagaaattgtggtatgtacacataatggaatactgtggagctgtaaaacagaatttgcagcaacattatcttaagtgaattaatgcagaaacagaaaaccaaataccacatgtttttacttataagtaagagctaaacattgggtatacatggacatagagaagggaaaaatagacacaggactacaagaagggagaaggagggaccggggcaaggttgaaaaactacctgttgggtactatgctcactacctggatgatggactcagtcataccgcaaacctcagcatcatgcaatatactcttgtaacaaacctgcacatatacctcctgaatagaaaagaaaagttgaaaaatttttaaaatgaagtaattctgagtgataaacaatcacaacctttgtagatactacaggttaggcaggtaggtaattgtaatatcatggagatgaaagctgtagctttgtgatagtttacaattactgatctgaactgagtagattgacttttcaaatgaagctcttctatggaataactaatgatttttttttttgagacggagtctcactctgtcacccaggctgcagtgcagtggcacaatcttggctcacttctctgcaactgattattaattactacttctaattacagaaaaggccacactgggaagtggagcagggtcttcaggggtgcccttaggaaagagccctgatgggatgtcttgggagagaaggctctggatagtgctcctgggtcactacagtgagccaggattcctagtccatcagcagctcagagatggacaagcactatcttctcatctaatacttccttttcattcacagctgatagatgttctttcacaaagacgcagtcagttggctggactcttgggacacgggtcagaattattggggtctgcccataccttattgttgatttggtttagggctttgaataggtcacttaaattcagtgtacctcagttattctcacaatcaagtaacacaagctaaaatctttgaaaaaatattttgaataacttccttatgcaacccaatgaatttcacaatttaatataaaggaagacacatgtatagccagttatagcataatgctaagaggatgctataaactgaagtgtctccccaaattaatatgttgaaatcctaacccctaatgtaaggatattagggggtggggccgttaggaggtgatcacctagatcagggatcccccaacccccagtacctgtctgtggcctgttaggaactgagctgcacagcaggaggtgatcagtgggcgagtaagcaaagcttcatcagtatttacagccgctctgctttgctggctttactgcctgagttcctgtcagatcagcagcagcattagattttcataggcgtgccaatcctattgtgaactgcacatgcaaaggatctaggttgtactctccttatgaaaatctaatgcctgatgatctgttactgtctgccatcaccccagatgggaccgtctagttgcagtaaaacaagctgagggctcccagtgattctacattatggtgagttgtataattatttccttatatattataatgtaaaaataatagaaataggctggatccggtagctcatgcctgtaatcccagcgccttgggaagccaaggtgggcgggtcacttgaggtcaggagtttgagaccagcctggccaacatggcgaaaccccatctctactaaaaatacaaaaatcagctaggtgtggtggtgcatgcctgtaatcccagctacttgggtggctgaggcacaagaatggcttgagcctgggaggtggaggttgcagtgagctgagttggcatcactgcactccagcctgggcaacagagcaagaccctgtgtcaggaaaaaaaaaaaaaagcaataaatgtaatgggtttgaatcatcatgaaaccatactcctcaacccccagcccccatacgtggaaaaattgtcttccatgaaattggtccctggtgctgaaaaggttggggaccactgacctagatgaatgcctagatgaatggtattactgcctttataaaagaaactcaggagagctcccttgcctcttctgccatgtgaggacataacaagaagacagtcatgtttgaaccagaagtgggccctcactggacaccaaatctgctggtgccttcatcttggacttttgcagcctctagaaactgtgaaaaatagatttctgttgtttataagccacctagtctttgatatttccttacagcaccctgaatggacaaagacagagggcttaataagacatgatgagttctacttcaggctgtcgctaagcttcacaggggaggggttatatctgagcctgaatttgagagagaagtgggttttgccaggcacagcaggctacaataacattggcgatgtcaagtgtgtggcttgttcaggcaatcaggacagtctgttctgccttttgtatgcaacaagaataaaaacgagttctaacagtgctccagtgttattttacattatgtttctctgcctggccccttcttttcctaagtctttgcttaggcattcttggtcataaaaatgacaaatggtaggagatgatagaccaaaaacaagctgatggttagaaattcagccagcaatttaaatattggtgcggatacctagcaagtggatgaaccacacaaataaataagatccaactcaaatggtgttttcttttgaaaacccacattttcgttttcttagatctcactggtttttacctttagaagcaggcaaaggatagtcattcactttgtttttgaacaatgatctattgacacattctggggacatctttcctctgactgtttgctgatagaaataaagcataggtaagccagtgttcctgtctccagaggcttgcaattcaataagcagaagagagaaggctctctacacacacagtagtgaagtaatgggcaagcctgatgttctccttaccaaaatatgtggaatagatagataagggttgggggcgggggaggaatcaagatggcctggagaaggctttgtggtgatttggaattgaactaaggccttggagatatctaaggagaaatgaagaataaagtgacttgcttgactctttatagcaaataaaattgctgggtcttagaaccaccaggagagtgtactgttgtcactgcagaagagttaatgtttaattgctagggaacacagctttctttatatggtgctccaaactctagctcgatttgttatctgattttctgctgtggaaagggcatttccaagattgatttcctgccagtggaaatgagcagctctcttcacgttcacccgggttggcccgggtcccagctggtttgcagatcagtgatgaagcttcctgccggtgagaagctagatctagttgagaggttgcctgactgaagccaaaccacacctaacgaagccgatagttacactcatgtagaaagtccagggagacacctgtccctaggctttaattagtgggagtttcagacagcaaagtttacctttactcaaacaagaagcctcagaagaacatgatcttcacacctgaactgttgattgcctggagactgctcagtgtgttctcccagtaaattgttcccagctcctctgacttctcccactcgacagattaaacacagatactatttattccatgtggcagatgcattctctgtctgtaatgatgcattttgaaaccagtactttctcaagtgagattagctgagatgtggaaagtataggaagtgacagaacagacagaaattctagctagagggttctagttagataaagagaaaaaggcactcagaggaaatttgctctgctcatctttcccagggcacagcaacaaattaaggctgtcttttctttctcctcttaggaatattatagggcaccacagaggaaaagattcataagtggagagctcactgagcccagaaggacacatcttgctgccagatctgtggcaaaaaggtgtaccttactttttttttataggcacggttcagccgtaccacaaacccacatggtcaggaagtgactcacgtattaatgccgtttgagtttgtgtgctgtggggaaggtcttttgacaatattgtgtatactggcttttccaatctaagagaacatctttgctgcattaacagtagatgttacatatttttttccctttaaaccccccatgaccaatagcttaccctatggcaagtatagttaggttactcgtaataattaatttggtatgctaactagttgagctcacagaaaaatgcaagtatgggtgtattcctttataatgctggggtgtttcttggggagggtcttaatattttaccaacttaggttttaccaatttttgcatatttatgtcaaatattcctatttgcagagtagtactaacttttgctttccaattacaaaagtagtaaatgtttgttgttaaaaagtacgataatgatagtatttccagaagaaaagtaaaattccccacaatcccttcatggcaatagctatattgttttgattatatgcacttccatacttcatctgtaccatgtttgtatgattacaaaaatagggctgggcggaacacatactttaaatttgttttttcctttacatgtctttgactcatttattcattcaagaaatcttttttgagaatgtacaatgtgctagtccatcacttttctaagtgcagtggagactacagtgaaaaaccaatggagctcacatatcatgtgtatctttgtataacaataaatgtaaatatgctagttattttaataagtgcatagtattctattttatagatttatcttaatttacacaatcaaatactccatttttggatgtcgaaattctgtttgttaggttttgttaaatatagggaggaaatatgcactgaccattggtgaatctgaatcgatgttcaaatgatctctgctaataacaggattgcactggtagtgccattctttcaaatatgactttacaaatagtgatatgctccttggaagatgtagctataaagatcagtatgagcccagagttctctcacttaacgactatggagatcctgaggcatgtgagactgtttccaactccacctctggctcaaaggctgcttaaagcacagttccagtccttataaatggacaccaagttgtcattttggctgctattcctttgcagccatttataattatgcagtgatgtgtgaagctgggcttctgtgaattctggaagcatttcttttgcctttgataggaattgctgctcatttgtcctctatccaacaaccagcaggtcactttcctaccatctgtgtgagtcccacacacagtgacatgaagtgatgtcacaggatctgtttgttggtgattccagcatgctgcttgatgttcagtacaaagcaaaacatagcccagatgaattacagaattttacagtattagagcttatatagattacacccccatcttaaggacaagggcaccaaggcatagagaggttgaataatttgcttaaaaatcacttagagcactttgggaggcctaggcgggcagattgcctgagctcaggagttcgagaccagcctgggcaacacggtgaaaccccgtctctactaaaatgcaaaaaaaactagctgggtgtggcagtgtgcgcccttagtcccaactactcgggaggctgaggcgggagaattgcttgaacccaggaggcggaggttacaatgaggcaagatcgcgccactgcattccagcctgggtgacagagcgagactccatctcaaaaaaaaaaaaaaaagtgtcacatagtgatagagctagaactaaacattgggacttctaatttcttgcccagtgttctttccagggaatcagctattccaagtttgtggtagattcacatagcatccttgtaataggtcaggaaacactattgctttggagtgcttctatttgtcatccagataaaatgtcttcagtaccaaacaatgccagtttcccaaatatggagcttttctttaattccccactttgttaatttgggaaaggctttttaggtagcttgctatatgcatagcagatttagtgatctcattgtcattgtgctttccattagtaggctgataaatgacctcaggtttatgattggaatgtctcactacaccagttctgtaaagctagccacaacaaaccatgtgtctctttaatatgaaagaagcccatcagatttatgatcatatttatctgggctaatagacctatttggattatttgatagattccactcagattttgtggaagtcacattttattctcttagggagtattggaatctgatttacaagtaaactcagtgtcaaagatctgagaaactttgcagtactgattgtttttgtaaggccaactgcaagttatttttgttaatgaagcaaagcagtattgcagcagcatatttgaagttgtatatcaaaaaatgttggggtttagtcatagaggccattttttgaggcatagtggttaagaacgcagactttagagtcaactgcttagtcacctcctggatctatcacatactgtgcagccttggacaagttatgtaatctctctgtaactgtttccttatctgtgaaatgggaatgataatagtactggtgtcaggtattgttgggaagtttaaataagttaatattttcaaagcacccaaaacactgtctggtatgtgctaaacatcatataagtgtttgatactattattctgacactttctctctctttttttttttttttttttttttgagacggcgtcttgctctgttgtccaggctggagtgcagtggcataaccatggctcactgtagcctcaatctcctgggctcaagtgatcctcccacctcagcatcctgagtaattgggactacaggtgtgcgccaccatgcctggctaatttttaaatttagagatagagtcttgctgtgttgccaaggctggtcttgaactcctgggctcaagctatcctccccgttcggcttcccaaagtgctgggattacaggtgtgagccactgtacctggtcgatttggacactttccattcattcattcattcgttcattcagtgatttcttggaatatcaatgtgataggcacaatgctaatgataaaaatattctcagccctcaaaggatcttgcagtttagtggtcagagagacatataatgcaaaccatgtaggcatacagtaaggaaagtcctataatgaaggactttaagtgcagtggcagttaggtgaaggagcacctgaggggaagccttcacagggaccatttgagatgggacatgaagcatgagtaggagttggccagtggacatcagtggtgtgggcattccaggcatgcatagaagcacaaagtcctgagaggatggcagaataactggaacacaaagtgtcagagtgggagatgctttggggacagttaaagagacgcacaggtaggggaccaggaaggcctcctgtatcctacagaggttcctgtgagagataataaggactcaaattcagacaggggccaatgagagggaacccagcagatggaggagatggccaggagcagtgagtgcagtgacacggttacacctgtttctcaggtgataggagacgtgcccaggtgctgctctgcttatcgatatagttcctctctgaaagttaaatggtcttttatgggtacttcacgtatttttactgtgttttcaggggataacaactatcaccaaaaacgtgtcatttcattgttttattgaaagttactgaaaaggaaatgcattttaggtagtttccatcagtcagaactacgaaaacaaaaccaaaccttaagaatacagatgatccccaacttaggatggtgtgaaagtgatacacattcaatagaaaccatactttgcatttggggttttgattttttccaaggctagtgataggtggtgaaatactctagcaattctgggcagcagcagtaacctgcagctcccagtcagccatgtgatctcaaaacaaccagtaccctacggtgtcctctgttgccagatgactttccccacctgtaggctaagtgtgtgttctgagcacatttaaggtagtgtaggctaagagtggttacgttcagtagattaggtgcattaaatgcattttcaacttaagacgttttcaacttaacaatgggtttactgggctataacccatcatatgtcaaggaacatctgtatttagcttagttctgtgatttacttttaaaaagaacacctaaatgcacaatttttggctaaaatgtcagatttttaaccatgaacttgggatttttaccccatttttctctttccattaaaaaaaaaatttgaaaggcgcttctaagataaatttttaagattagatcccggccgggcacagtgactgacgcctgtaatcccaacactttgggaggctgaggtgggtagatcacctgaggtcaggagtttgagaccagcctgactaatatggtaaaactctgtctctactaaaaattcaaaaaattagctgggcatagtggcatgcacctgcagtttagtcccagctacttgggaggctgagacaggagaattgcttgaacccgggaggcggaggttgcagtgagccaagattgcgccattgcactccagcctgggcgacacagcgagacttcgtctcaaaaaaaaaaaaaaaaaaaaagattagatccctacataatgcaaggcattattcaacattttttaacactttcttataaacattaagtgaattcatggtacatatactcagtaaatagaacttttaattccaattccattataatctgactctaattaaaaatccttaaaggagataggggagttcaaatatcccactgctctagatgtgtccaaatgaatgtcctccatgggcacttcaaactcaacattttcaaacatgtctttcagcccagacctgacccagggaggcagtattatgatgattcccaggagtgttacaaaacaaataatattcctttttgattttaaaaaattgcattaaaatcaattataaggtagaaaatacgtgtggatagatttatttttactaagttatatccttcagtgggctctttatttgaaatattactaggactttatgtacatgttttgcctcttgaaagtactattccattactgaccattttgttattattcattctgttttcttcctaaaaagtggatagacaggaaatcacctcctctcacccacccacccttttttatgaggacaatgacactgagtaattgattgtcttaggcatagccacacacctgagtagagcaaatactaatagccagacttcctgactcccaaaccattacttcttttttccttcacctttgcagaagagaaagaaattggtgccatgagcctgggcctaaagaactgttcattcagtaaataattataaggtgtcttctatatgccagatattattttcaacatggggacttctgcacctaacagtccctgcctttaaaggagctggtggctaatgggaaagtaagtggagtaaacaaacgaacccagctccatgaatgaagaaaactgggagaggcaaggccagagtctaatgaaggctggagagagccctaagccagtctgggagttaagaaaagcttcctggtggagccgacttctagttagagtgttgaaaatgacccagagttgctgggctagagggtactgagtttgcatgcatgggagatagagtgtcaagaactcccagtattaagagtattaagatctgggccaacaaattggccttagaggtatgggctctgggagaggaggctggaataggaaggaaaacagagaaaggatctgtttgaataattagggcttagaatttgtattgtaaacaaacaatggtgagctgttgaagaattttgaggagggaatgataatcagatttccatttttaaactgttgccctgaagtgatttggagaatgaagtgagggttggggatgtgagttaggagagccattattgatgatgaaaggtcagttatgagactgctattgtcatcattaacataagttaattttgaagacctaaattaagggagagcagtagaaatggaaagggcaaatggcttccagaaatgttgagataaaatcagcaaacctcgattctgattagatgtaggggacgagtcaagtctgggttgaaggaaatgtctggagatgagtctgaagtgcccatgggggacattcttttggacacatctagagaagttggatattttaattcaaacctcagaaaagatctggttggaggcaaatttggaaatcagcggatacaggtgtagctgaagctaagggcctgggagaagtacctgtctgagaggcactgtggatggtgaaaagggggcagataccacaattgacagggatggtgggagaagaaagccaaggtggggccagagagggtagtgtcattgtcacttaagccaagagaggaggcattggttagcattgggaatccttgcagagctcaggagagataagcattaaaacagggtaatagtttcacgggagagaaatgactctcatttcctctgtaacatcaaacctaaactttcactaattccactgcacctagcccactcccttcctcattactccccagtagcccctctgctcacagacctaccaggaagtcataccattcctatgctcttattttgcctctttgctagaatgccccaattctcacttgtctgagctctatccagccttctagggctaacacaagcccacttccccccaacgctgccccaggatactccgagtttgttctcttctatagatctatttgtatttcgctctagtttacacttgtttatgtgtgtcatctggtgttgttggctgttgattcatgaagtttgactcttctaagcttcttgaggtaaagggtcttattgtattcttcctctgcggcctttgtagcctggaatagtgttgaatagataatccttgctctgaaaaagatttctggttgatcaaaattacaagacttgagattatccagttaataaaaattcttgaggaagatttaaatttcagctgtccaggagctggagtgaaccctgtgcaaaggagattgttctaaggtagaatcttggtcagctgatagtcacatcaggttaggtaggagggtgtgggaacagaggccagaagtgagggaggggctctcttactcagtgcagccacctgggaaggctgggaggcttcaacatcatgatgacaatatgtggtttcctccaaaacgggctcaaattttacagctggtcctttgaatcatggaagcattgcccatacctgcttggtgaaagtgaggcctaagagggaggggggcagaccccacttgacagtggtttctgaagttaatgatgataaaagaattataactcatggtaccatttttgtagctgtgttagctgctctcaaagggagaatttcatggcagaggaagaggtggttgctaaggaaatgacagaaaaaaagaaaacaacccaaaccctctttctgaccacaagtttagaatttttcttttcttttttctttttttttttttttttttgaggcagagtttcactcttgttgcccacgctggagtgcaatggcgtgatcttggctcactgcaacctccacctctctggttcaagtgattctcctgcctcagccttctgagtagttgggattacaggagcctgctaacacacccagctaattttttgtatttttagtagtgacggggtttcactatattggccaggctggtcttgaacttctgacctcaggtgatctgcccacctcagcctcccaaagtgctgggattacaggtgtgagccaccatgcgtgaccttagaatttttcatgaccttgcactaccaaagggaaatttaagtcctttcttgttgttgttgtttttgagatgaagtctcgctttgtcacccaggctggagtgcagtggcacgatctcggctcactgcaacctcctcctcctgggttcaagtgattctcctgcctcagcctccctagtagctgggattacaggcaccggccaccatgcccagctaatttttgtatttttagtagagatggtgtttcagcatgttggtcagggtggtcccgaactcctgacctcaagcagtccacccacctcagcctcccaaagtgctgggatttacaggcgtgagccactgtccctggctgggaaatttaagccctttttaccctcagaggacagatctttgcaaccctctcattcctgagaggtaaggaatcatattctgagttagagcctatggtggttgtatccctggactctcaggttcctttgtggctattgggttacacactccagggggtggagttattaagaagaccctgagatctctgtggctgcattttaaagatctcatttgtaagggaaatgatgattctgccaatttctctccccttgtgcaccttttcttttgaagttaaagttaatatccctttggacttgtacctctctgcttcttagttctataaatctcttcctagtttattttctgaaagagtgaagtagaaataatttccagaaaataacttgtcaacataaagtcatgagggaggctggtgatatgagaaatagaaggaactgtcagagctctgcagtcatggtcttctgcagaccaataataaggcagtatcatgttccgtcctttctccctcagaacagacagatgccagttagttcccaggtctgaattgtgctctcttccaatcgctaaactactaaaacccaaagttttagtctttagaaattcagttgagttgtcagtttataagaacctgctatgtgatggatacgctattttaaggatatgaagattagtaggaattgtgtggttatatattatttaactctggatgcaggaatcgtctgattggtttgggttcccaaagatgagagaaatagccttgattttagacagcatgcagacagggatactgggagcatctttggggattccttcttctatagtcactggggttatacccagtgactcaccttgatttctcccagccataaaatcagactggtaatttcatctggtttgctctctacttcacaagaggtagtagaagactatatctaaagaatagagcactttaattccccagaactccaacaagcccagcacccccagattatatgttgctaacagcaacagggcaacttgagaagttatcccacatcccaggcccattcctgtagttcgtccaccaaggtcagttggagaaacttccatccagaactgaactctaaggcactcggatccctctgctggctgatagcagaagcaccacttagctttttcttttctttttgttttcaaatgaattcaggtattctaattagcattttctttctctctcccacactccctctttctgtgtttctctttctggctgactgtaatccttaatacacttctcttggtgtctttaattcctacattgagcttgagttcatagcccattcctggtagaagaccactgtctgatgggtgctggctaaatgaatgcctcaatacagggttacaggggctgccatagaaataggttcaaggtatggaggggacattaggccctgaactcatgaatgattcctgcatctcatatcagtgatggtcataataatggcaagtagttatgcagacttggaaccaagcactttgttaaacactttacagccattatgtcatatagttctttttcagccctgtaaggcagcttctctgtcatttactccacagataacaaagctcaggctggattcatgcagcttgttgatggtggggctcaggatgtgagttcaggtctctctggcaccaatgtcataactgcaaactacaatgacttcagatactccaggctttccaagcccatatcttggcagaagttctttgaccttgctctctgcctagaagtctcttccgcctttatcttttctcaggaattctgatttttccttcaagattcagttcagggtcacttcaagagggctatacccccatcctttccctgttttggttgtttgctgagacctctgtgaaccagtgtttgtctctaatggagcacttattgcacatttttgtgttgattcccctacatgtctgtctccccagtaaactttgatctctttgaaggcaggaagtgtatcttaccagtctttgtatccctagtacctagtacctagcacagagcccagctcatagcaataaaaatgacagcaatatttcacatttactacgcacttaccttgggctgggcagagtgctaagcacttcattttttagaccctctcatttaactatcacacaacccatataatatatagaattatgaagaaactgaggctgagagaattctataacttgcccaaggtcaccccagtaagtggcaaaactggagcttgactccaggtctccctgaacttctttacattttattaattttcatgccctacacttttttacctgattaggtattttttctcttccaatattgattgagacgtatgagtaggaattacattttctttgctaaaattagtaagcaccttgaacagtacttgctgtatgtgctccagtacttgctgtatgtgcttgctgtatgtgctccatttagataaatcagatattaaatttttctgaagaaaaaagcttgggaaacataattacataaggtaactagaaatgatcaaaatctatttctttacctagcaacttcagatgaaattttgcagcagttttatgaaatattttatgaaataattgctgtattcgtctgtcactgagaaatacaagtgtaagttaagcatttctgaagcctgaaattcaccgagtgcagttttaattacccaagagaagcaaatctaaaactacttgcttttcagagcataatttaaaaaatgaacaacagtctttgcaatgagattttatgttaaatttaggtcacatgttaattttaactgttaggatatcctagaatgtgcattgttctttaccaacctaactgatgagtcaatttgcctgtcttaaatatgaggcttagtcagttgctcacctcatattttcaaagtaccagtgaaattagtggatagtttaagattaggtaggtgctaaagaaatacagtctatcattagctatatcaatatttgtaattcttatacttcaatatgatatttcatgctattaaagcctgtttattacattttaatatcgagaaaagcccatatcctttaaaggttaccttacttataattaaatcttgataatcattaagtcattggtatcactaaattatgttagggtagctaacatttccattttacaagatgtaactttgcctcacactgagtgtagtaaacatagaatattgggacaggccaggcatggtggcttaacgcctgtaattccagcacttttggaggatgaggtgggaagatcatttgaggttagaagttcgagaccaacctggccaacatggtgaaaccccatctctactaaaaatataaaaattagctgggtgtggtggtgcatgcctgtaataccagctacttgggaggctgaggcaggagaattgcttgaacccgggagacggaagttgcagtgaaccaagattgcgccactgcatcccagctgggcgacagagcaagaccctgtttcaaaaaaaatcttcgggaggctgaggtgggcggatcacctgaggtcgggcgttccagaccagcctgaccaacatggagaaaccccatctctactgaaaatacaaaattagccaggcgtggtggcacatgcctgtaatcccagctacttgggaggctgaggcaggagaattgcttgaacccgggaggcggaggttgtggtgagccgagatggtaccattgcattccagcctgggcaacaagagtgaaactctgtctcaaaaaaaaaaaaaaaaagaaagaaagaaaaaaaagaatattgggacagtaagggatcttggtccaactccattattctacagatgaattaaaggaggctcaaagaagctgtctgcagctccttgcttcctctactgtaccagaaagccacgttgcattaaaataaccacggatcctagccggcctggtggctcacgcctgtaatctcaacacttggggaggctgaggagggaggagtgcttgagcccaggagtttgggcccagcctgctgtacatagcgacacccctgtctctacaacaacagcagcaacaaaaaattatccgggcgtgttggcgtgcatctatggtcctagctactctggaggatcacctgagcccaggaattagaggttgcaatgagctgtgatcgtgccactgcactctagcctgggcgacagagtgataccccgtctcaaaagaaaagaaaatagccatagttccttgtccgtcttagctgcattcgtgtctcactgcggctttgccaattttcctttcttttctgcaggttgcataccctgtcctgagggcgcggcacggagtgcatgcgggccgctgccatgacgaccgccatcttggagcgcctgagcaccctgtcggtcagcgggcagcagctgcgccgcctgcccaagatcctggaggatgggcttcccaagatgccttgcactgtcccagaaacggatgtgccccagctcttccgggagccttacatccgcaccggctaccgccccacggggcacgagtggcgctactacttcttcagcctctttcagaaacacaacgaggtggtcaacgtctggacccatttactggcagccctggccgtcctcttgcgattctgggcctttgccgaggctgaggccttgccatgggcgtctacccactccctgcctctgctcctcttcatcctgtcgtcaatcacttacctcacctgcagccttctggcccacctgctgcagtccaagtcagagctctcccactacaccttctactttgtggactatgttggcgtgagcgtttaccaatatggcagtgctttggctcatttcttctacagctctgaccaggcctggtatgaccggttctggcttttcttcttgccagcagctgccttctgtggctggttatcttgtgctggctgttgctatgccaaatatcgttaccggaggccttatccagtcatgaggaagatctgtcaagtggtgccagcaggtctggcttttatcctagacatcagccctgtggcacaccgtgtggcgctctgtcacctggctggctgccaggagcaagcagcctggtaccacaccctccagatcctcttcttcctggttagcgcttatttcttctcctgccccgtgcctgagaagtacttcccgggttcctgtgacatcgtgggccatgggcatcagatcttccatgcatttctgtccatctgtacgctctcccagctggaggccatcctcctggactaccaggggcggcaggagatcttcctgcagcgccatggacccctatctgtccacatggcctgcctctccttcttcttcctggctgcctgcagtgctgccaccgcagcccttctgaggcacaaagtcaaggccagactgaccaagaaagattcctgaggctggcaagtggggcaacgtgtggaggaagcccctcataatttggagaaaacttgatacaatagaagctgactcttaaggcattggcttttaaattaatacatatatccaaggatatgttatagctgcagtgtttgaaagccaaaggatttaagagttttgttgttgttaataaaaggaatactccttttccttttggatcatagcttaacaaggcacaggaagggaagggatcttgactaagattcatgagacattgaattaaggagaatcatcttcatgcctgaaaatttagcaaaattccgactatggcctccaggggcaattcctaaaagctgaatggataataaaattggactggaaagtaagtaggtggctggtcctcaccctgttggaatggctatcctactatgctgttctttggtaatggaataaattgacccaaggaccgaatttcatttggatttcaaattgtccagagtggaaaagccttcaagatgacatgatgaattactcagttcatctgatttctggtccctcctttctcgacaactataatactaacccttttctcaggataactgtctacacctggcagttttctctgacgtgctgttcactcacatccctaccttgcatggtaatataaaggactaggaagcagtcatacttccaggaaatgcttggattcatgtggacattcaggaagcttattctcatataatactaatctaaacagtactagaaattacagtgccaagagccaccaggaggcccagccaataagcatagatactatatggtatcatgggacccatctattttttaccagtggactacaggattacttgagagttatcagggctgcctaacagaccaggagatctgggggttgcaccagggaatcgccatatttgaccagcatgttttaaaagctcttggtaggattagttggttctaaggatccctctagggacctcattatttcaagaggaacccaaagtccagcctcctacatagatgctgccccacgaaggacccacaaaactaacctagttcagggttctcaggcaggcagttctgcttcagcttagagcagaacccataaaatactcaagtactgggataggcaagcatgtgtgtttactgtggattggtccctgaaggctcctttgggtgagaacatgtgaaccaggcaccctggtttgtttggagcattgctgcccagaagcttctatgggataggtggtgcttgggattgatgtgttgtggccatgcagccctccctgaggattgacttctgcactaatccagtgaaggaggctgtgtcaaaagaagggctcagaagccctcttttcagaggcaatgattcctgtcagtatgaggtcccttagttactaaaaagggacatgatttaactccagtttgatgaacctcctccgagtttactttattgtcttcaaatcttttgttttcttcctttttgtgagatttgtgggttttgtgccttataaatggaaatgtatgaacacaatatatgctcatgtagaattttctgttctgggttattgggataagaaaaaatatatattgctcttcaactagtgaatgaaagaaacttcagaaagctagaattgcttatcaatcaaaagactttctcaatctattttggccacaaacaaacatattcaactgaagctttccaataatctttatatcaagaaagcatgcgtcttgtcagctacattgttttcttagatggatttctcctgttaatcctcaaatatctgaacttctgtgttacccaagtgtcttatacaagcttctggtgtctaggacaaatttatggcaaataaaattagcaaaactgaactgggttgaactgaacaagaggatgggggaattgtgcaaatacattgttagtagaaggtcaatttaaaatagggactagaaattatttgaagttttctttattacggattcaaagacttattttgaaagttggaaggagaagggagggaagagagcagaagggaagaaggtgtaagtcaagctcttgaatataactggtggtattgtgggcagagatctttagttcaaatccacgtattttttaaaagagagaaccggaggtagagcaatgatcagatgggtgcacagaccagtgccaatctgaacattgttaatggcctgtgacatgatgagcacaggaacaggcatgaagatattgccatacaattttaatttatacaagtattggcccctcaagtggttggaaattttttttttaatctctttttctgagacagggtcttactctgtcgcccaggctggagtgcagtgatgcaatcacggctcactgcagcctcgacctccccagctcaagcaatcctcccacctcagcctcctaagtacctggtactacaggcgcgtgccaccacacctggctaatttttgcattttttgtagagacagggttttgccacgttgcttaggctggtcttgaactcctgaactcaagtgatccgcccacctcagcctcccaaagtgttgggattacagacattagccatcacgcctgccctagaaacagttttttaataggagatatttgagaggcattgaggtaggagactctatgacatgccctcagaatatcagaatcttcttagaaataaactaggaaatgcagatgtttttaactactcagacttttgaggaattaatccttttaaaacatttttgttaaagttagtgtatcagtaagaaacagacctagtttaaaaggaataatcaacaattttataaaggagatggcttattcaaccatagcccctccaacatatctactggaaattctgctggttaactttatctctctctctcttaatttagactttcaacctatgaaaatgtaaatacctttgaaaaaactaaactatcagtcatttacatcttctcatgaatgaaatgcagtgtagggagaggagatggcaggacacagcaaacaggacacatttgcctgcttctctcttgcctaattcttcctgacctgtatttactgatgcttaataatacttgtaagactctaggggttcatttcccatttcagcggaaagtacttcactcaacaacaatattctcaagagtcttctactggaagctagaaagaaataggaatttaagtccatagaatgaaggtagttattcctgcctgtgttgcccacctgttcacaaaaagtacctttatgcttgaaaacattaggttctttggttactgcactgtagtttcaaatggatcctccagatggcattcatgtcttactcagaaagggcactgccattgtccccaaggcttctgtctactaattctattggtcttgtgttttgcttgattgcttggcaaaaaaaaaaaaaaaaaaaaaaaaaaaatggagctattttctgtctatataaatctacttatatgaataaccattaaagtgattttgtatatgcattgttgtagtgtcagcagtttaaagaaacagctactttgtttctttgacaaggtcttaacaaggactaccctgaagaggccccctctgaaaggttttatttatacaaacattgtcaggaaaaggaggtcaggacactatctctaccaagaagcaggaaagtataaaaacttttaaaaaatctccatgccttatcccccatacacatatcccccatacacacaccctaatacctacttgtgagtagaacaaattgcttccccacaaaatgctatgaagttgatttctctgaagatttcaatgtaattaaataaatattcctagtttcatagatgatagtgtaaaagatttcaacatttttaattcattggctacaattttataaatgtaaaaattatgaattatactatgatttaactatagcaggtactacaatgtacgtgttgtgaaatgtggcatctattaaccaactaattatgtagccttcaaagttagattaaaagagctgtgtaaaaggtgattctctaggcactgctgaagctgcaactgcagcttcaggctatagtactatcataatcactaagaaaacagcatttctatggctagaggctccactggtcgaattatggttgtcactcttgcccaaaccctttttttttcaccagcaggggccccaggcagtttgaaaatccttctgttgttactgttactagtttaaccactcttcagttattaatttagcaagaatttattgagcacctattggtgaaaggtaccaccttggctctggagacaccacagtgtggaaaaacacactctgtgggcagagagtctgccgtctgctaaatgaggaccagtatcttttccttgggccatgagggtccctctccccggatcgtggttccaatcacagcctgagggccaggaggctgggacctggtttgggccagaacttcttcataaggattaagccctctctcccctttacctccagaggttggaaacatcttcccctgtagcaaggcagtcaccttaaagctgcctctacttcccgttactcctgctacttctccgacccttctcactaccctctagttgttttaactcagtcatggggatccttgacacatccagacagagagagagagaaggcctaaatttccacaagcagtagcgacttcccaggtacataaagtcccatccttcaaggaagaggatgtgtggttccaacctgaatacaggttcctaacttggtaagttgaaaacagcatgctgcactctggctacctccttaaaacaataaccatatcctttgtggaattattatagaagtaatttaacatggaaggaaaatcattgcattaaaaagataattcatttaaatattaactttgggagcatatctatctatggtaagggcttttcttacataacaggattctcactggaagaggtattcactatattttaagattccaagaggcctggaccatatggaaggctacagaataacagctcaaattttattgtgcattatgatttctaaaacatttccacatcaatatgagcttctaaactgtatgaggtaagtaaggccaaacaggtctccattgaactaggaaacactagaaaggtcaagtgactggtttgaagccacacaactagttataatgtttaaactcatttttccttcagaaaaattcacggtccagctaatcagaaacatcagcaccaaatacttgcagagctttttacagcaaatgaagcacttttatgcattatgtacactttgacataatcttttaacttttgatcctaatatctcatgcatagccagggttgcatcatttcttttttgagttaaagtgacttcactccacccacatccttggatgcagaataaagcattcattgcatcacagaggcttctcagaaccccaaagttcattgtccatgggcccttggggactggattataaagtcaagtcctactctccagtcagtttcctgaaaatatgtttggatccttggatgagaaagtcctgccaaatctcaaatcctcccttttatcttttgatgggattgtcagttctttaaacaatcacctttccccgggattttgacaagagatatgaacttgaacatgggatttaaaaaatgtttctctgccatatgaaagagttttgcagacttactagaaagcacaaaaaagtctttgattatttcttaaagcaatatatgcttattaaagaaactagaaaagtagtaagaaaagataatccttggatccatcagtaaaataaaatccctgttagggaaaaataaggcttatgtcaaaatattgtcaatgataaaaggtgtagcagtgtcatgtaaagattcctgaaaaaacagatattgtaaactagaaattttaagcagcctagtattttattctttaagttacaaaatcaaccgtctggctcagtttacaggagtaccgagaatgacattacactcccttctgacattatattatgtaggtaatttgatgttgttgtggctgatactggctcattaatccaagccaatgatacattgtctctcatgttgaaagaattgcatggaatgtttctcctgaatcaagctctcagagaggactgtgctagaaatacctttactggaggtaaggactggcctgctgaacctgtgagtatgtggattcattgtcagtccttccacagtgaccactgctggataccaggctctgttctaggcacctgggatacaggaatgaataaaacacacaaattcctgcccttatggagaaacaatgaaccaaatcaataaattatatattagaagataacagtgccaaggagaaacagagagcaaggaagagagatagactggagaaattggtaagtgtgccattttaaacaggatcagggaagaataccaaaaaaggtgatggagccagctctgtttctcacccaggcaaagggaagaagtgcaagggctctgagcctagggcatgccaggaatggccaggagggaaaatgcagagagggaaaatacagcagaagatgaggacaagttgtataggtcttgtgaagaattgcttttactgtgactttgggaatggggtatgtgaggaagaattctgtccaaggaaattcagggtagctatctatcgatatggattaattactaattgcacattactttgcctttaggaaatagagcaaattctgtttcctgcaatatgcacaaaaccagattgacatcaagttattccatgtgtaggccgggcccagcaaactctgtgttcctgtggccacactctcatgcttgcagaattcttcccagattcctcccagagcatttttaaagtgcccagaatgttgacctctgcttctgacataggctttgaatgttttctcattctttggacactagtttgtactctggataatcctctgggcagaaatgacatgacatgtctaaggcagagcctataaattggggataataacagtttacattatctagtactcaccacttgccaagaactgagctgagctgttttcctagattccttcatttaaccctcatagtagccctgtgaggtaggcactaatactgcctccattttgcaaatgaggaaactgaggcataaagtaaatttgcccacaactacctggctcttaagtaatggaatctcacagacactcaggcctttgaatccagagtctatattcttagccactaaaattaagtgaatgtagaagattctttcctctaacttctcacattgtcacttgtgtgaaccataaaaagtttaaaattaagagggaagtgtaatgtagatttccatctccccacccctgataaatgaagtaaacctaaggatgcagttctcattttatttctagacactttagccaagcaaaagtccttatactgttattgtcgaatggtaccaaggctgagattcctaagtgtattttgtgctagaatacaacatggcgctactcacattacaatctcagaagccctctgtaatgacctgaaggatctgaaggacagaaactcactttaagaaccactgacttcaaattatttttgcatgcttctctaatgtttataaaatgactctagtgaatactttctcatctttaggaccttttaatatatcttattcctcattaaaataaatttgagcatgattccaggctaaacaaatttcttaaagacagcaatggcaacatgcaaaatatctccatctagtgttttctcttttctaaacaagaacaaattatcttggaatctgactaattttgctccaggaaaaatacctttgcacacagtacccggcacaaagtttgtgttcggaaagtgctagtggtaatcacacagtcattatttctttttctattttttttttttgagatggagttttgctcttgttgcccagggtggagtccagtggcgcaatctcagctcaccacaacctttagctcccaggttcaggcgattctgcctcagcctccctagtagctgggattacaggcatgtgccaccacgccccgctaattttgtatttttagtagagaccaggtttctccatgttggtcaggctggtctcgaactcccaccctcaggtgattcgcccgcctcagcctctcaaagtgccgagattacaggtgtgagccaccgcacctggcccacagtcattatttctatcacttcacgctgagcagggtgttgtgagttctgcacaaattcatccacactctccaagggctcccagacgtctctcaccagaacaggagctctctgtccttgggagggatttttctccacccacaacggaataagatgtagttcatcttccctgggaaatgggggatttcttgctttcctccacattccttccctgacattcagtctgcatgatcaaagactctctcaggcatcaggaagaaccttccattggtacacacacacaccacccagacattctggcagcaccgccctttctcactatggtccccaagtgttctcagactacagaagaaaccctactggtccacatactcattttttctaccttttgattcccatctattatgtgtttgtgtcccttagatatattgaagtcctaaaccccgctgcctcaattagtgaccttatttggagacagggtagttgtacatgtaagcagttaagatgaggtcatactggacaatctcttaattcaatatgactggtgtccatataagaagaggagaagacacagaggaaagacagccatgtgaagacacatagacacacacaggggacagcatcatgtgacaatgtaggcagagatgggagttatgtatctgcaagctaaagagtgccaaggatttctggtaataagcagaaactgggggatggggtgtgtgggttagggtggcggggcaggcagagagagagaatggccttgccagcaccctgatttcagacttctagccttcagaactgtgacagaaaaaaaattctttttaagccacccagcttgtggtactttgttacgatgaccctagaaaacttaatacagcatcgcagggccaacctcagttttaacctccctatgaaattgacagttttttctaaccagtggctcttggtctctcaactcagcaagcacaggtagagaatgggacacgaagacccctcccttcccccccatctataccctattaaagggagaaatgggatttgcagatctcagcagagatacagatgggaagcttatcatgtgtgtgaatacaatagaacctctgtggtagggagttaagtacagagaaaatgttgtgaacagccagtttcagtgtggctgtgtttcccatctgagtctaccctgtgtaagcaggtgctcctgggttgcaccttggcaacttcccacctgggtctttgcctctactcttggtactcacaaccaactcatctacctgcaagcaccttcatctttgggtgcaaaggttttatattcaccgtctgcctcgcattctagtggtgataaaaaaaatagtaaaccaaacaaatagggaaaagaccatggctccacggaaagctccagccatctagcctcctctgtggcccaccagaaagctgttgtgctcttttcataaactctacgttgaaaagagattagatgccctcctaccctctaaaaggatctgggtgtgtgtgtgtgtgtgtctaaaaggatctgggtgtgtgtgtgtgtgtgtgtgtgtgtatgtgtatgtgtatgtgtatgtgtatgtgtgtgtgtgtgtgtgtgtgtgtgatatttattcagagttggtaggtggggggtgggtaaaaaggaaagaaagacttaactcacacaaaccaaacccttctacatgttgcattctctaaagtgcccaacatatttccctaccccccttttctcctttctttttaccttaatctgtctttaattttccatagtttttccaattcccagtcactgaccaaactgtccattcaccatgctcccccagacaatggtaatagcaaacagtcagtgagcgcttactatgtgccaggcactacagtaagtgctaacatatatgaactcatttaatgctcacaacaaccttgtgaattgggaataacaattattattcctgtttatggctattaaaaggtttaagaaacttctgcagggtcacagagctggtaagtggtaggatttgcaactctgcagtctgactctgcagtccataatattttatttttatttttttattacgaaaaaccttgagcatatacaaaagtagatagaattgtatgatgaattcccatgtaatcacatacacaattatcaaatcatggggaatctagtttcatctacatccctactcacttgcttctgtccatattattttggacattatataattatataatatatactatctcatatattatataagatattatataatatctataattttatagatgttatataatttttcctacaatacatgctttttatgtatccttaaaagatgaagactctttacacaagaatacaatatcattatcatgtctaaaaaactgaagaacaattccttaccatcaaatatcctgtgtttgaattcccaatggtctcacaaatgtgataattatttcaaagtatttagtttaaatcaggatcccaataggacccacacattgcaattggttgactttttacttaaatctctttctaatttataggtttcccttctaccccagtctttttactcctttccaattcagttgttggccaaacaatcatttgtcctggagagtttcctacagtccactcactttaccgctacatcattctgcctttggggtactatattgtagacttttcattccatagattttaaagaggggaaaactcaatgaagtgatttctagactcactggagctttcatgaactacatgaaattataagtacatgtgaatgtgtgcattttagggaaccaaagtctaaagcttttacaagattttaaaaatgatcccatgaccctcaaacaattaatggtcattagctctggtcctggcttttcattttagagatgaaaagcaggagacttggataggtaaattgtccaaactcacacaaatattcttaacaggacaggaatgtggctctcaggacctaacctgttctactttctgtttcatgctgcatatgtgaaaggggaaaaggaaagtggtttgagatgctcaatagaaggtgtcaatttccctattgtttcaaagttgccatttacctgaattaatgaattcacttcttgtccacatttggaatctaaaactctagtcaatgttactaccacaacattctcacacttctctttctccgtactattgagagctttattatgccagagatgtctcacaagcaggatgccaagatcaatgatctgtcctgagctaaatgaggactgtctttcctagatgtcagaggattgaggtggagtgtaagaaatactcaattgggaaccagtcattaattgatagttccttgatctcttttggtctggagatttctcattagtaaaatgagctaaccggactgtgtcaattacttttcaagcattttgactgtgatcatgatatactctcactatgaatgtatatgtatgtatatatcttgaaaaaactttcactgaattattcttacaaacaaaatggaatgcatctggatagtttctattctattcttttttaaaaataattctcgttgtggtcacaacctattaagttgatttgaagaactgctaaaggaaatctgcagcagtttgaaaaatactttcccacgtgaccgctgagtcattcattcattaactgtagtaggtcagtaattttccaactatttaatggacatctatgtagtgctaggcactgtgatgagagttaggaaaatggcaatgaaaaaatgaagaccatcttcttatgacgcttatatcctgtgaagtatgttccatcagctttgacaaggaaagagaattccaacggaatcagctaaagctattgaataggtttgacttaagggaggaaaaagcagcagaaatacaggtttttccaaaccccaggcaggagcccacatcaagactaaaatagtctagacccaaatgatgtaatttttgtgtcaaatgaagatctcctgtggatcctaaatctaatcactggatgtttctccttttcccatactttgcaaagatcgaagtggatgactgggccctctttttagataaaatatttcagaggccatggagtgatggaaaggaatgctagagagcactctgactgagggacaccccctggccatattcacgtgctcaccacacccccaagtacctgcaaaacctgcaggtatgtaattggttgttttcttttccagaaattttgctgtaccatttttacccagcagagggaagcagaacaccaaatcactgcagaagtaatccaggacacatgcacacacagccctttggtattttttgtcctgtgaatttaggtattatagaatgagaatgtcacagttttgaaaacaaattctgggtaaagtcagctctgggcaaaatgctgaaagaggagaggtttattttagctgactgcttatggcctgtcccatcaggattgcctggaagacattacccagcccacaaggccctctttcaggcttggctcctggcagtctgacctttcaatttttttccattccccaagttttggaacacctgctaaaatcatgcaatatttctgtggtcttctgagtcaggctttatgcaatggcctttcaatcatggcatttcctactttagctgccaggaatggtcagtttcctgccctcttttatatattccactaagtgggaaatggtgggtacaaactgaagtgcaatgcatgctaagtggtcatgtagactggagtgcagtggcatgatctctgttcactgcaacctctgcctccccggttcaagcgattctcctgcctcagcctcctgagtagctgggactacaggcatgtgccaccacgtccagctaatttttgtatttttagtagagatggggtttcgccaggctggtctcaaaatcttggcctcaagtgatttgcccaccttggcctcccaaagtgctggggttacgggcatgagccactgcacccgactgggatacaaactcttaatcacagcagaccttctgaggatccaggtacctttctgaagccctgcctttcctcccgccccacttctttacagacttgtccctgtgccttttaacactaatgcagtacgtctgacttcccctcctcagagatgatagcatttttaggaggccatagaccaacagaagttgtctt

SEQ ID NO: 3373 - DNA, 3616 bp, Homo sapiens
aggttgcataccctgtcctgagggcgcggcacggagtgcatgcgggccgctgccatgacgaccgccatcttggagcgcctgagcaccctgtcggtcagcgggcagcagctgcgccgcctgcccaagatcctggaggatgggcttcccaagatgccttgcactgtcccagaaacggatgtgccccagctcttccgggagccttacatccgcaccggctaccgccccacggggcacgagtggcgctactacttcttcagcctctttcagaaacacaacgaggtggtcaacgtctggacccatttactggcagccctggccgtcctcttgcgattctgggcctttgccgaggctgaggccttgccatgggcgtctacccactccctgcctctgctcctcttcatcctgtcgtcaatcacttacctcacctgcagccttctggcccacctgctgcagtccaagtcagagctctcccactacaccttctactttgtggactatgttggcgtgagcgtttaccaatatggcagtgctttggctcatttcttctacagctctgaccaggcctggtatgaccggttctggcttttcttcttgccagcagctgccttctgtggctggttatcttgtgctggctgttgctatgccaaatatcgttaccggaggccttatccagtcatgaggaagatctgtcaagtggtgccagcaggtctggcttttatcctagacatcagccctgtggcacaccgtgtggcgctctgtcacctggctggctgccaggagcaagcagcctggtaccacaccctccagatcctcttcttcctggttagcgcttatttcttctcctgccccgtgcctgagaagtacttcccgggttcctgtgacatcgtgggccatgggcatcagatcttccatgcatttctgtccatctgtacgctctcccagctggaggccatcctcctggactaccaggggcggcaggagatcttcctgcagcgccatggacccctatctgtccacatggcctgcctctccttcttcttcctggctgcctgcagtgctgccaccgcagcccttctgaggcacaaagtcaaggccagactgaccaagaaagattcctgaggctggcaagtggggcaacgtgtggaggaagcccctcataatttggagaaaacttgatacaatagaagctgactcttaaggcattggcttttaaattaatacatatatccaaggatatgttatagctgcagtgtttgaaagccaaaggatttaagagttttgttgttgttaataaaaggaatactccttttccttttggatcatagcttaacaaggcacaggaagggaagggatcttgactaagattcatgagacattgaattaaggagaatcatcttcatgcctgaaaatttagcaaaattccgactatggcctccaggggcaattcctaaaagctgaatggataataaaattggactggaaagtaagtaggtggctggtcctcaccctgttggaatggctatcctactatgctgttctttggtaatggaataaattgacccaaggaccgaatttcatttggatttcaaattgtccagagtggaaaagccttcaagatgacatgatgaattactcagttcatctgatttctggtccctcctttctcgacaactataatactaacccttttctcaggataactgtctacacctggcagttttctctgacgtgctgttcactcacatccctaccttgcatggtaatataaaggactaggaagcagtcatacttccaggaaatgcttggattcatgtggacattcaggaagcttattctcatataatactaatctaaacagtactagaaattacagtgccaagagccaccaggaggcccagccaataagcatagatactatatggtatcatgggacccatctattttttaccagtggactacaggattacttgagagttatcagggctgcctaacagaccaggagatctgggggttgcaccagggaatcgccatatttgaccagcatgttttaaaagctcttggtaggattagttggttctaaggatccctctagggacctcattatttcaagaggaacccaaagtccagcctcctacatagatgctgccccacgaaggacccacaaaactaacctagttcagggttctcaggcaggcagttctgcttcagcttagagcagaacccataaaatactcaagtactgggataggcaagcatgtgtgtttactgtggattggtccctgaaggctcctttgggtgagaacatgtgaaccaggcaccctggtttgtttggagcattgctgcccagaagcttctatgggataggtggtgcttgggattgatgtgttgtggccatgcagccctccctgaggattgacttctgcactaatccagtgaaggaggctgtgtcaaaagaagggctcagaagccctcttttcagaggcaatgattcctgtcagtatgaggtcccttagttactaaaaagggacatgatttaactccagtttgatgaacctcctccgagtttactttattgtcttcaaatcttttgttttcttcctttttgtgagatttgtgggttttgtgccttataaatggaaatgtatgaacacaatatatgctcatgtagaattttctgttctgggttattgggataagaaaaaatatatattgctcttcaactagtgaatgaaagaaacttcagaaagctagaattgcttatcaatcaaaagactttctcaatctattttggccacaaacaaacatattcaactgaagctttccaataatctttatatcaagaaagcatgcgtcttgtcagctacattgttttcttagatggatttctcctgttaatcctcaaatatctgaacttctgtgttacccaagtgtcttatacaagcttctggtgtctaggacaaatttatggcaaataaaattagcaaaactgaactgggttgaactgaacaagaggatgggggaattgtgcaaatacattgttagtagaaggtcaatttaaaatagggactagaaattatttgaagttttctttattacggattcaaagacttattttgaaagttggaaggagaagggagggaagagagcagaagggaagaaggtgtaagtcaagctcttgaatataactggtggtattgtgggcagagatctttagttcaaatccacgtattttttaaaagagagaaccggaggtagagcaatgatcagatgggtgcacagaccagtgccaatctgaacattgttaatggcctgtgacatgatgagcacaggaacaggcatgaagatattgccatacaattttaatttatacaagtattggcccctcaagtggttggaaattttttttttaatctctttttctgagacagggtcttactctgtcgcccaggctggagtgcagtgatgcaatcacggctcactgcagcctcgacctccccagctcaagcaatcctcccacctcagcctcctaagtacctggtactacaggcgcgtgccaccacacctggctaatttttgcattttttgtagagacagggttttgccacgttgcttaggc

SEQ ID NO: 3374 - protein, 349 aa, Homo sapiens
MRAAAMTTAIRLSTLSVSGQQLRRLPKIDGLPKMPCTVPETDVPQLFREPYIRTGYRPTGHEWRYYFFSLFQKHNEVVNVWTHLLAAVLLRFWAFAEAEALPWASTHSLPLLLFILSSITYLTCSLLAHLLQSKSELSHYTFYFVDYVGVSVYQYGSAHFFYSSDQAWYDRFWLFFLPAAAFCGWLSCAGCCYAKYRYRRPYPVMRKICQVVPAGLAFILDISPVAHRVCHLAGCQEQAAWYHTLQILFFLVSAYFFSCPVPEKYFPGSCDIVGHGHQIFHAFLSICTLSQLEAILLDYQGRQEIFLQRHGPLSVHMACLSFFFLAACSAATAALLRHKVKARLTKKDS

SEQ ID NO: 3375 - DNA, 4633 bp, Homo sapiens
gcccgccgcggtcacagccacccgcgggaagctcgtggccgggaccccgaggcgggagcgcgggctgggccgggctgggctacgcgcacgggctcggccgccgcccctgccggttgcataccctgtcctgagggcgcggcacggagtgcatgcgggccgctgccatgacgaccgccatcttggagcgcctgagcaccctgtcggtcagcgggcagcagctgcgccgcctgcccaagatcctggaggatgggcttcccaagatgccttgcactgtcccagaaacggatgtgccccagctcttccgggagccttacatccgcaccggctaccgccccacggggcacgagtggcgctactacttcttcagcctctttcagaaacacaacgaggtggtcaacgtctggacccatttactggcagccctggccgtcctcttgcgattctgggcctttgccgaggctgaggccttgccatgggcgtctacccactccctgcctctgctcctcttcatcctgtcgtcaatcacttacctcacctgcagccttctggcccacctgctgcagtccaagtcagagctctcccactacaccttctactttgtggactatgttggcgtgagcgtttaccaatatggcagtgctttggctcatttcttctacagctctgaccaggcctggtatgaccggttctggcttttcttcttgccagcagctgccttctgtggctggttatcttgtgctggctgttgctatgccaaatatcgttaccggaggccttatccagtcatgaggaagatctgtcaagtggtgccagcaggtctggcttttatcctagacatcagccctgtggcacaccgtgtggcgctctgtcacctggctggctgccaggagcaagcagcctggtaccacaccctccagatcctcttcttcctggttagcgcttatttcttctcctgccccgtgcctgagaagtacttcccgggttcctgtgacatcgtgggccatgggcatcagatcttccatgcatttctgtccatctgtacgctctcccagctggaggccatcctcctggactaccaggggcggcaggagatcttcctgcagcgccatggacccctatctgtccacatggcctgcctctccttcttcttcctggctgcctgcagtgctgccaccgcagcccttctgaggcacaaagtcaaggccagactgaccaagaaagattcctgaggctggcaagtggggcaacgtgtggaggaagcccctcataatttggagaaaacttgatacaatagaagctgactcttaaggcattggcttttaaattaatacatatatccaaggatatgttatagctgcagtgtttgaaagccaaaggatttaagagttttgttgttgttaataaaaggaatactccttttccttttggatcatagcttaacaaggcacaggaagggaagggatcttgactaagattcatgagacattgaattaaggagaatcatcttcatgcctgaaaatttagcaaaattccgactatggcctccaggggcaattcctaaaagctgaatggataataaaattggactggaaagtaagtaggtggctggtcctcaccctgttggaatggctatcctactatgctgttctttggtaatggaataaattgacccaaggaccgaatttcatttggatttcaaattgtccagagtggaaaagccttcaagatgacatgatgaattactcagttcatctgatttctggtccctcctttctcgacaactataatactaacccttttctcaggataactgtctacacctggcagttttctctgacgtgctgttcactcacatccctaccttgcatggtaatataaaggactaggaagcagtcatacttccaggaaatgcttggattcatgtggacattcaggaagcttattctcatataatactaatctaaacagtactagaaattacagtgccaagagccaccaggaggcccagccaataagcatagatactatatggtatcatgggacccatctattttttaccagtggactacaggattacttgagagttatcagggctgcctaacagaccaggagatctgggggttgcaccagggaatcgccatatttgaccagcatgttttaaaagctcttggtaggattagttggttctaaggatccctctagggacctcattatttcaagaggaacccaaagtccagcctcctacatagatgctgccccacgaaggacccacaaaactaacctagttcagggttctcaggcaggcagttctgcttcagcttagagcagaacccataaaatactcaagtactgggataggcaagcatgtgtgtttactgtggattggtccctgaaggctcctttgggtgagaacatgtgaaccaggcaccctggtttgtttggagcattgctgcccagaagcttctatgggataggtggtgcttgggattgatgtgttgtggccatgcagccctccctgaggattgacttctgcactaatccagtgaaggaggctgtgtcaaaagaagggctcagaagccctcttttcagaggcaatgattcctgtcagtatgaggtcccttagttactaaaaagggacatgatttaactccagtttgatgaacctcctccgagtttactttattgtcttcaaatcttttgttttcttcctttttgtgagatttgtgggttttgtgccttataaatggaaatgtatgaacacaatatatgctcatgtagaattttctgttctgggttattgggataagaaaaaatatatattgctcttcaactagtgaatgaaagaaacttcagaaagctagaattgcttatcaatcaaaagactttctcaatctattttggccacaaacaaacatattcaactgaagctttccaataatctttatatcaagaaagcatgcgtcttgtcagctacattgttttcttagatggatttctcctgttaatcctcaaatatctgaacttctgtgttacccaagtgtcttatacaagcttctggtgtctaggacaaatttatggcaaataaaattagcaaaactgaactgggttgaactgaacaagaggatgggggaattgtgcaaatacattgttagtagaaggtcaatttaaaatagggactagaaattatttgaagttttctttattacggattcaaagacttattttgaaagttggaaggagaagggagggaagagagcagaagggaagaaggtgtaagtcaagctcttgaatataactggtggtattgtgggcagagatctttagttcaaatccacgtattttttaaaagagagaaccggaggtagagcaatgatcagatgggtgcacagaccagtgccaatctgaacattgttaatggcctgtgacatgatgagcacaggaacaggcatgaagatattgccatacaattttaatttatacaagtattggcccctcaagtggttggaaattttttttttaatctctttttctgagacagggtcttactctgtcgcccaggctggagtgcagtgatgcaatcacggctcactgcagcctcgacctccccagctcaagcaatcctcccacctcagcctcctaagtacctggtactacaggcgcgtgccaccacacctggctaatttttgcattttttgtagagacagggttttgccacgttgcttaggctggtcttgaactcctgaactcaagtgatccgcccacctcagcctcccaaagtgttgggattacagacattagccatcacgcctgccctagaaacagttttttaataggagatatttgagaggcattgaggtaggagactctatgacatgccctcagaatatcagaatcttcttagaaataaactaggaaatgcagatgtttttaactactcagacttttgaggaattaatccttttaaaacatttttgttaaagttagtgtatcagtaagaaacagacctagtttaaaaggaataatcaacaattttataaaggagatggcttattcaaccatagcccctccaacatatctactggaaattctgctggttaactttatctctctctctcttaatttagactttcaacctatgaaaatgtaaatacctttgaaaaaactaaactatcagtcatttacatcttctcatgaatgaaatgcagtgtagggagaggagatggcaggacacagcaaacaggacacatttgcctgcttctctcttgcctaattcttcctgacctgtatttactgatgcttaataatacttgtaagactctaggggttcatttcccatttcagcggaaagtacttcactcaacaacaatattctcaagagtcttctactggaagctagaaagaaataggaatttaagtccatagaatgaaggtagttattcctgcctgtgttgcccacctgttcacaaaaagtacctttatgcttgaaaacattaggttctttggttactgcactgtagtttcaaatggatcctccagatggcattcatgtcttactcagaaagggcactgccattgtccccaaggcttctgtctactaattctattggtcttgtgttttgcttgattgcttggc

SEQ ID NO: 3376 - protein, 349 aa, Homo sapiens; identical to SEQ ID NO: 3374

SEQ ID NO: 3377 - DNA, 31300 bp, Mus musculus
  misc_feature (1)...(31300): n = A, C, G, or T/U
caggcccgtgtctgctcatccaccttactaacctgaattttttttaaatgacaaaaatttggggaacaaagattgttgggataaccttttttaccttgtgtgaaggcatgtctctgtagttttcatcgttaattctgtaccagcagagagctaaatgctggcaggattttggtattgtagattttatgacccatcactgggttttctattttgtaaatatttgtccttccacacatgcctaaaggcaatctagaatatcatcagaggttgtctcagtgccgattggttataataaagatctgccagccaagagcttagacggagggcagaacttcctggcagagagaatgaggaaggatgaaaaaagtcaactccagagattcaagaggtgacgtagaaaggaacagacatgaaccacagcacagaaagctggccacatggcagatcgtaggcaagatataatcaggtcaagttagatgaactagctgggagaacgccctggcaaaaggcctaggctttaaactatattaaaagtcttcatgtcattatttgtaacactggaggatctgagaaagtcccgcaataaaagatgtaagttgtctacagtgaacctgtattaattgttaataaaggaaagcttaactgaaggtaaaatgggctgggaagcttcaggataggaggacagcccctttttgcttctggattagttaggacagacagtctgaaagctcgtatgtaagctggtgcacggtgatgggatttacatagaagttccgaccttgtcttttattggttttcccatcagctattgactgtttaacgcctttcctccctttgtaattaaatttagagcattttatattttatttcctttaccctttcctttacccagggaagtttacaatgatgacaacaccagaggaaaatttccaaacaacctagagattctcgtggtagcaagactcccacacaattttgctttggtgacctctatgctttacctcaggcacgtagaactcgtagttgcattacacccagatgagcaatatgcctatggagaggctactgtgcttttgtcgcatagacattcttctcttttcttctttcagacttacgcaatctgtttcttctcagctaccacactagtgtccagccctctttctctgcagctctctgaatctgtgagttttagtccctaagacaacaaataaaatcagtttcagttttatagtatattagttctcttgttggctgtgatgaaatacccgagtaaagcaacttaaggaaggagggatgtgcttggctcgaggtttgaaggagacacagtcccatcacagtgtgaaggactgttccggcagaggtataagatacccggtcaaattgtgtttcagtcagaagcagatggagccaaacactgacttccagtgtcagcttcctccttcttccttctagttatgtttttcaagcctaggttttgagcttatttgtcctcttcttagaaactggcaccgtcacagtggatcagggcactgttggggctctacgccttttcttttgccagcaccaactctagccttttgctgttttctggaggtccttctcttctcataaaggatgtgtctttcgagcctgtgttgaggctcattcttctctgcataatccaaagagccatagatcacaccaaagccagtcgtcttgccaccaccaattggaatacaaagatgacctttggtgtggttttgtagatttgggctagctctccccccaacccccaccccgaacttctttctttggaactgctgcctttccagggtaaagattatcaatggccatttgttttctcagaagcagatggtgaccgcaaatgccgtcaagttgacaaggaagattaacaatcgcgcaatagtttttaagtataaatcaagtcctctgaaagagcagctagtgctctgaaccagagtcatttctgcagctcccatcttatcactgctcttattgagcataatgtggaaagttctagacaatgcaatacagttaacaacaacaaataaaaagcatatgggtcaaagaagtataattgtccctattttaatatgacatggtctttgtaaagtttttgttgttgatgttgttgtcttgaggtgggagaggaacctgggattgaacccagggccttacacttgctaaacttgccttttaccactgagccacacctgggcttcatgcatatacatttaaaaacaaactattgccagccatgggacaggaggacttctttgagttggaggtcagtctagtctacatagttccctatcagctaagactagagtgatatcctgtctcaaaaaataaacaaaccctatacaaaatgacacaaacaatgcctagaccagtataagtggtaaattccagaggattacaaagtcagcatataaaactcacttgtatttctacatattagaagtgaataatcaggcctggagagatggctcagtgggaaagagcactgactcctcttctgaaggtcctgagttcaaatcccagcaaccacatggtggctcacaaccacccgtaatgagatctgacgccctcttctggtgcgtctgaagacagttacagtgtacttatgtataataataataaataaataaatctttagagagagagagggagaataatcggaaatacaattgcttttgtttagacagggttgcactttgtagcctagcctagtcttgattccacacttaagctcaggatacctagaacctgcatcagccccctgagtgccagcattgcaggtgtgccaccacagccagctggaacttttttgttaatgccaactgtgaatgatcctcacttcacgataagagtttaaagtagtgaaacagaggcagtttaatttatgaccctgcaaggctgggcatctgcctaattgagcacagagaacacttaagctctaaatgtgtgaaccttcctcttttgcgttagcagggggcagggccttaggaatcactttggtcatatcttcccttctgtcatgtgctcccctgctccccaaaccctgtgagatttcatctctatgttttacatcctgtttattttaaagcttgtcagatacatgacctcacaggcaagcctagatgttgacagttttctcctctgcacttgtcctttccgtggatgtggggacaagcagtttagcagaggttgagtggggaagagcaggtaggctggcagcatggccaagggtctgctgtttttgtttatttgtacctaagttggcttgaggcaccgttgaaaatgaactatgggattttattttaaaaagaataagaaatacagacattcatctagatgccatgaatagacctacagaaccatattgacacatttgtgtcttttcacaataaacttgcaaggtgtggtgggtttgttggcaacaatttgccaagtagttcctctttccttgacagctgtctacacagatgcaagttcttttattctaatcttaattactattagtagcactcagatcacaaagcaccctgtgaatctattatctatctattatctatctatctatctatctatcatctgtctctctgttataggtggctacaaagagttaaagggctactgaagagttaaaaaattcaaagcaaatctgagaggctgaagcttggaaatggatacgcatgtaaagtctcttaataagtctgtgagtctgctagaaacactgtgcctactactgctgcagagtcaggatgcaaggttaaagttggacttcaaaaacaagatgtgggaccacagaggttctagatacaaagagcaggagctggtccaggaaccccctgagtgaaccatgcggagccgagatcaatgcaaaaagcaagaggaatttattgtttcagtgcgttgaggtcatcccagacctgaaggagaggcgacctctagcgctgttcagcaagttttcatatggtttccaggggcagaatagagcatcagcaactaggtacaatatgattggctgaacactgtgccctttaaactgattggtctttagggaaagaggtgacaaggacttcccttgtctgaaggtgggcaaaagtccatctgccctgtagtctgaggaatgttaatcaacctctcccttcaggaggggcaagtgtttcatgaccttcccaaagttcctgggctgaccttttcaatggcagacccagatggatggattacaattcagacaggctgctccaacagcaggactgtgctgagctgaagctccagggacagtcagaagttctctggcactcagtcctttgacatatgtactagatggtcacatgacagtttggtggggccactgccattgtagtgctaggtgtcttccctgttatggacctcatgaacctcaacaagtttttggaccttggtatgattttttttttattacgtattttcctcaattacatttccaatgctatcccaaaagtcccccatactcccccccacttccctacccacccattcccatttttttggccctggcgttcccctgtactggggcatataaagtttgtgtgtccaatgggcctctctttccagtgatggccgactaggccatcttttgatacatatggagctagagtcaagagctccggggtactggttagttcataatgttgttccacctatagggttgcagatccctttagctccttgggtactttctctagctcctccattgggagccctgtgatccatctatgatttttatataaccatgttcctacagttccagtttattttgataaatttatagggtggcagtggcacctttcacacttttaaggcttacccatctgtgccttgttggtggtactggaatggtggtattgtttacatgcctctcaaggtacagagtcaccctacttctgcatttgcttataagatagaatttttcagagtaaggcttagcccctgaaagcactgttttacaccacatggagtaattcagggtcttaacaaatagtccttaataatcggagttttctaacactgctggtgggactggacaatcatcagccactgtgatgttaacatgtgcccacatgactgggctaaggatgcagagagtgctgttaagacattattatttcaggctgtgtttgtgaaggaattatggaagaaattaacgtctgagtcagtagtttgaggaaggaggatctgccttcatcctctgtagatggcccacacccattccactcaggatctaaagagaaccagaggcaggggaaggggaacctgatttctctttctgagctgggccatccgttatcaacactcttgcttctcacttcttcttcaggttcagcttgagaaaccgcagacttccctgataaccaggcttttgggcttgaagtctatagcaggctttcctggttctcctgcttgcaggaagcaggtgagacagaaaaaaagaaaagaaaagaaaaaagaaaaaagcaggtgggacttgcttgtcttcataagcacatgggctaaaatctagaataagttctcatatgtttatattaactttaattttaaaaatatttttaaaatttatttactatatgtaagtacactgtagctgtcgtcagacactccagaagagggcatcagatttcgttatggatggttgtgagccaccatgcagttgctgggatttgaactcaggacctttggaagagcagttggcgctcttaaccactgagccatcttgccagcccccttaactttatttttatggagagctctgactaatgcaatctggaaagatgggtagcatttttttttctcctaagtttaaaaacaaagccagatgtggtggctcattcctgtagagcactcaagaagctgaggcaggaggattgttgtgaattcaaagtcagcttgggctagatatgagtcctaggccagtgtgatctacagttaagggttatgaagtgaggggtactggtgggtccatgacaaggtgtgcccctgagtaactacagcatgtgatagatctgatataaaagggacttattagggagtggagaggagtggggacctggagaaggagtagagccagacagaaaaagggagagagaccaccaggaaaacacacacacacacacacacacacagagagagagagagagagagagaacaagcgtgagttctgggctggcagacagcccacaccttcccacacctgggacactgggtggcagccaatggtccctgagatgctaggtccctgagaggagcctagtaaaatctcctgtaagccaacaataagatcctgtgtcaaactactaaagaaaaagggacagggaactggagagatggctcagcagttaagagcacaggctgcttttccagaggacatggattcaattcccagcacccacatggtggctcacaaccatctgtagctccagtttcaggggacctgatgccctctttctggcatagccagacatgcagtgaaaacacattacacataaaagaataaaaaccagcacttgggaggcagaagcagactcgtttctgtgcatttgggactatcctgttctacacagtgaattccacgacagctaggggtacatagagagatcctgtctcaaaaaagcaaaaataaatgtataaacagaacaaaacaaaacaaaacccacaaaaacgtaaagtatatacatacctacaggcatacttatatgaacccagccagtccactcttaggtacccaacatgtacccaagagcataatagctttgtttgtcaaagctgtacatagaaacaatctagtggtgaaccagcacttcggtggttaagtagagtgtggtatagccatacaagaaatgaaaagagctacggatgggtgcaacaaaagcaggtttactgagtgcaagagaccaggcacaaaggatatgctgtgtaacttagtgtgcacaaacttacggaggatgtgctgcaggccatagtgataggaaagaaaacagtgattgctcagagaaggtaagccccaagtggccatcgggggacataagagatgcttcaggagccacgtgtttgactaccttattgtggcaacagtttcacgtgtgcatactttatccaaattcatcaaagcctactacttaaatatgcatggttgtgtccatgactttatgtcttaataaaaatggtcttaaaacacacaannnnnnnnnnnnnnnnnnnnaaacacattacacataaaagaataaaaaccgcacttggggaggcagaagcagactcgtttctgtgcatttgggactatcctgttctacacagtgaattccacgacagctaggggtacatagagagatcctgtctcaaaaaagcaaaaataaatgtataaacagaacaaaacaaaacaaaacccacaaaaacgtaaagtatatacatacctaaaggcatacttatatgaacccagccagtccactcttaggtacccaacatgtacccaagagcataatagctttgtttgtcaaagctgtacatagaaacaatctagtggtgaaccagcacttcggtggttaagtagagtgtggtatagccatacaagaaatgaaaagagctacggatgggtgcaacaaaagcaggtttactgagtgcaagagaccaggcacaaaggatatgctgtgtaacttagtgtgcacaaacttacggaggatgtgctgcaggccatagtgataggaaagaaaacagtgattgctcagagaaggtaagccccaagtggccatcgggggacataagagatgcttcaggagccacgtgtttgactaccttattgtggcaacagtttcacgtgtgcatactttatccaaattcatcaaagcctactacttaaatatgcatgttgtgtccatgactttatgtcttaataaaatggtcttaaaacacacaaagtgatgctggggagatagggggagatcagtctgtctgtatgtgcttatcctacaagcacaaagacctgagtttgacctccagcacccacataaaaagattatgcatttccactgttggggaagtgaagacaggctgaccagtctacccagctaaattgggagagaccctgtgttaaaaagcaaagtagatggctcctgaggaatgacagccacggttgacatctggtacgcataagcacctgctaatatgtgagcacatatacccctccatgtaccccccaataaaaatataatatgtaaagtgaagaggcaagtcgtaaactgaaaatcattcgtagcaatacaatgtataaataagccatatttaaaacatctctagattcctgggctgacgagatggctcagtgggcaagggagcttgttgccaagagtgacagcctgagttcaatccacagtacgtggtagaaggagagaagacatgtccacaagctgtccacatatgccatggtctttgcatacacaaaaatgcatgagcgggggctggcgagatggctcagtggttaagagtgccgactgctcttccaaaggtcccgagttcaaatcccagcaaccacatggtggctcacaaccatctgtaacgaaatctgatgccctcttctggagtatctgaggacagctacagtgtacttacatataataaataaataaatctttaaaaaaaaaaaagaaaaaaaaatgcatgagcatgcgcacacacacacaggtcaaagatagacatttaagagctcctactcttgcagagaacaaggatgcaatttccggcacctacagagcctgcccacaaccacttggaacttcagctccagaagatccagtgttcacttccggccttcaagggcacctgcatacacttggcacacagacagacaaacaggtgtacatacataaataaaactagacaaaaagaatcttgttaaagtcagtatattggcccactagtcacaagctaactgaggaaggtctcaaagggccttgggatggatgagggctgagtttgtcccgtgtctttgtgagcagtctgaggtaatcaggatagcagatctaattggatttgtcttcctagcacttagccatcctaatatcgctcctgtgagtctctttggggtggggatttcacacttattcagaagagtttactgatcaagcctcagaggtacaaattttccacacggctaagtggataatctaacttaaagaacaagatctccaagtaacaccttcagaggccttcttgctttctgcactgaggttgggttctgtgaaggctggtccagagaatgtggagggcatttatcaagaggttgtaagagaacaggggaaattgttagtttttcaaaagctttttttgtcctgtctaatagaaggtctgttgtgcagtttagtgaaagcctaatctaaacacaattcatttatttaacttgtcttagggctgtctcgatttctcttcctcttctgaagctgttgggtctttctaccacatcagctgcaagacttactgcctcactgnnnnnnnnnnnnnnnnnnnnccttatcaatctgtccttctctctctcctgctgtattaaaatcactgggcacaggtaaagagtggagcagaaggagcaggacacctccacatcacatccttcacacccccatggttttcttccattaatttccggcctcctacctccagcgagctggactgttgtggggttgacttctctctggtgtagtctgaagaccaactgaacaccaatcattttgaaaagtccccaagctcaacaagaaaaagaaaaaaaattaacaattgagagccctagcatttaatctacaccctgagggatgaaggatggcatcagaagcaacctgtgtgaacctgagtgacaagagccaattggagacttggccacaggtgtgtggaggcgagacagttaggtttatttcctcttttctaatttgagaggtttcatgttgaagaaaatcagtatgttggggttgcaggaggtataaacccagtcaccatgaagctgagctgcacgctcacacagtgggccctttatgtctgtcctgctgtcctggcaatccagatgttactgggtaagtaaagtgtttgaatgctggtgtggagatgagatacgccaaatcttgaggaaatcctcaaaggtaagaagcatggactcactgactttgcaaagaattactgctcaggcgggacaaggacagatagaagacaagtcagacgtgaaggactgaatggctctttctaaatataaaaattctaatagtttccatcctaaaagtcccttctgactatgaagcctttgccaactgcaaatcttagctcttacttttctaatacaacttttttggaagagcagtgcgggcttgcaggctccacctccttccctggcacgcttccctgcttgcagcgtggcctccactggagtctggattacgtagggtacagtgacctctgctctaaccaggtcactgtacacttttcggttcttaccgtgatgggtttctttgttttgtctagccctactggctgcttattctctcttgcagcctctgttttcctgactgtcactgtcatttactctgtttactgctgggatgtcttttggtccttcagtagcttttctttgccttccataaactccagtgtgctctaaagttaaatcttttccctccctccctccctatggttccttttacatcttcagtttcttgtagtgtatcatctcgcattaaccccagtttattgaatcctgcagcattataataccactttcgaaaaccatccagccacttgcttgatgctgaaannnnnnnnnnnnnnnnnnnnnnnnnnnnnnnnnnnnnnnnnnnnnnnnnnnnnnnnnnnnnnnnnnnnnnnnnnnnnnnnnnnnnnnnnnnnnnnnnnnnnnnnnnnnnnnnnnnnnnnnnnnnnnnnnnnnnnnnnnnnnnnncctttacacaggcattttgacccgtgtgtgtgtgtgtgtgtgtgtgtgtgtgtgtgtccatgtacctggtaccaacacaacatgaccagagatgagttcacacattcttgcatcctcacttcttttcatttactttttatctgatctcagctcactgcactagccctctgctggaaacccaactcttcctttgtcattctctgcatcatcatcattgacaaatgtcacctcctaacttgctttctcaaccagttccttctctggaccactacaaatgttttcttaggactgagctgggcaatggcttccttgccaaccctgtctcagcctcgtctcacaggatgaattctctctacatccggagtgacttctaaaacttcagctcttgttgtggcacataaaaccccaaacctggtacccactaaaccccctcagcctctttggcatacccaaagccttcccacttccactctcacaaaactcaatgagcctgcatttccattcacagcccagattcctatctgcctccgagatttgcttatattgttagctccatctgaaatgacctctgccatgactccccagtcccctccccctttacaagcatctaagtatccttaaagactccatcttgagagcatcttctgaaagaagccttgttggatccccagtggctgccgctgacactttgttattgctgttatccaaacactacaacaatcctttcttatgcatggtcttctaccaaacccagagctatttgtgggaggcccaggtttttggttttgtagcaagaactgtggtcttgtatcaggtactctgacttccggcccctctcccagttactacttttatatcacttggaaaaattctctttctgttgagcataggagcatgtcatgtacctttaatctcaggtctaagaagcccgaggcatgaggattgcctcaagttcaaagtcagctcaagtcacattgtaagtaccagaccatccagggatgcattataaaatactgtttaagaaaaaaaaaatcactctcaggtcaaaatggcgggccgatctgctgtttcagcatcaagcaagtggctggatggttttcgaaagtggtattataatgctgcaggattcaataaactggggttaatgcgagatgatacactacaagaaactgaagatgtaaaagaagccataagaaggcttcctgaggacctttataatgacaggatgtttcgaattaagagagccctggacctgactatgatgcatcagatcttgcctaaggatccgtggacaaaatatgaggaggacaaattctaccttgaaccctatctaaaagaggttattcgggaaagaaaagaaagagaagagtgggcaaagaagtgatcttttagttaagatttgtggatgtgcctggtctcaccatacttttacaaagttatttcaacccaaatcacaatttaagaattatttgttctacctatgccacactttaaataaatgtctattgtaaccatgaaaagaaaaaagaaaaaaaatcacttttaatatatcctaattcacttttccctgttgtaaaaacgaggataatacctcccattgaaccatataaggaaatgccaactaagccagcaaggctttaactttaattaattaattaatcaatcaaataagtaacgttatatgtgactgttttgactgagggtgtgtctgtgcaccaactccatgcctgataccttcagaggtcagaggagagcatcagatctcctgcaactacaggttgagacggtcgggagccactatgtggacgtcaggaaccaaacctggatcctctgcaagaccaagaaggattttttttttttttaaatagctaaccctactctccagctctgaggttttattattttgtctccgaaacaaaataaaaggacgctgagcgcagacatctgatagtggaggaactgaaaaggggtagagagaagagggcggagctacgggtaccaagacagtgcaaaccaggaagtacacttgataaggaagtttaaaaaagtccgagagtctgggcactgggagaggatgagaacaaaggtgcccgggatgggagagagtggagtgaacaagaaaacacatatgaatatgaggactaagcagggcaaggagcagggagagcagggagaaatgacattacctatcctgggtcagtcatggacctaagagatattgtagagaggtagggagaagtctctaaagttttgacccggaggcaaagaattgttccaccgctaccagagcagcctgacagtaaagggtagcagggaggggggaatggggaaagagctttgccatcactaggggaaaaagggataactgaagagcaaagaatggactgactggtggtcatgcatgcctttaatgccagttctcaagaggcggaggcaggcagaccccatagtttgaggacagcctgctctacacagcaagttccaggacagccagagctagacagagaaacactgtctctaaaaccaagaaaaagaaaaggagggaaaaaagaaaaatgaagacttgaaaggggaaacaaaggggaaagggggcatagctacttttgtagacaacatattcttatttctaattgattatttatttacatttcaaattttgtcccccttcctggctttccctccacaactccccatcccatcccccctcctctttgcctctaagagggtgcttccacaaccacccaaccactcccacctcacctcgctagcatccccattagctggagcaacaaacctccacaaaaccaagtgctccagctcccattgataccagataaggccatcctctgctacatatgtatcgggtaccatggacccacccatatatactctttgattggtggtttggtccctgggggctctgagggggtccagttagttgatattgttgttcttccttatgggattgcaatcccttcagctccttcagtccttcccccaactcttccattggggtccctgcgctcagtccaatggttagataacatagtctaccctaaagagccaaataatttcgagaagatgagagtcagggcaggatgtcaccaaggaggctcagaggagtaaagtagactcggactgaagtaaaacaaaccctgcttctgagcttgcagtcatccctgacattcttgctccattctcgactctcagggtgtccttgtcgctaggatcaaacccagagcctcttgtaggctaggcaaacgttctgccgtccaggcttgcctgcctgtctgctttcctttttaaatgtacttgtgtgcatgtgtggggtacatgtttgtatgtgtgtgggtgtacacgcacacgtgtacatgtgttagtgtggatcagagaacaacatcaagtgtcccattccttagatcttttctacctttctgttttattttatcgagacatagtctttcattggtctgggcctcactgtgtagcctaggctagctggctggctggccagcaaccctttgggatcttgcctatctttgcctcccaagcactggagttacaaggctatgtttgctccaccaatgtgcaaactaagcggttttccaactgctctatctcccagcaaatccccaagtctttctttaaactcgtttaaatttgattttgtagaactgcttctttaaaatttataggatggacaacccggccttgtagcttatacctgtggctgaggcaggagaattgttgcaagttcaaggtcggcctgggctacatagagagtgtcaggttgacttggactgcagagtgtgaccttgctcataaaacttcatcatcaacaaaaatcatcagatgacagtgagcacacttatctgaaaggcagacttgtgaagattaaacagtgcaccaatgtgtcagcagtgtgtgacacaccgtggatgctagaatctgatgctcatcttttcttcctcctgctgtggggtcatggctgtcactgtcctttgatttcctgaaccaacagctggatgtcatgctgctgagtttactgttccttcattcccccccccccttccccaaaccatagtcttttcaccaggaggcgtgaacgccaatgagccaaggtcaaagccatcccagtgaagacccataggagcctcttagagaggtttggtgtcttcttcttctctcctgagaagatattcccagggcagaagaggagccggtgtggagggtccttcttattccctttccccaagttgcagtatcattctctgactctccctccccagcagctgccagtttagagactctgaagtgtgaaggacttgtcagcactgagcaaggcagctgccaggctgctgctgaggaagatgagggtgatgaagatgatggcgatatgacccaatccagtgaagctgacttccagttcaagggctacacattcagtaaacctttccatctcagcgtgtcctatggtgagatcccagtgcctcaaaccactcctggtagccccagtccactcagggaactggcataggtagacgttccccatccttagctcccaggagaaaaaaatgccctagagttattctctcgactctgggtcaatcacgaaggcacaagacagggtgaggaaataccgtgagcagtctgtaacactaagttcaatctctaagtaaaaattgttcccggggaaccagtatttttggggactggagggcaggagtagagggggagggcagaggaagaaagaggtctttgccattgttatatgaattctaagggaagagagcagtaaggtggtctagtaggagttgaaagtgacctggacagtttaggggacctgctatgaacattgcttgggacttcctaagggatgcggaggatactgaactcttactttgggccacagactggctgatccttcaaggtccagctacattgatatttgaaggagacacattggttctgcactgccgcgcctggcaagactggccactgactcaggttatcttctaccgagagggctccgccttgggtcctcctggacctaaaagtgaattctccatcaccatggtgcaaaagtcagacggtgggcactaccactgcagtggcatcttcaggagccctggtcctgggagccgagaggctgcatcccctgtggctatcactgtccaaggtgagcatctgagggagtgttgctgtggtagatttgggtgagaaggaacagagagaccagcaccatcaagatctatggtttttgatgttcacagatccagagcctggattgtcttttctagtccctgcctagaagggaaagaagcaggaagaggagggaggagggagcgaaaggagggggaagagagagaagaaataagaagggaaggaaaagaaagaaaggaagggaggaggagggagaggaggaggaagaggaaaaggaggaggaagttgatgaaaagttcaaatgggaccttcctaaagagaacccacacctagtagaaccagaggaaaggatgggagagggaagttatgggtctgttgttgacctcttcttcttcacttcttgtcgttttcctagagttgtttgcagccccagttctcaaagccttaccttctagtgagccccaagagggaggctcagtaaccctgagctgtcagacaaagctggccctgcagaggtcagcttcccgcctcctcttctctttctacaaggatggaaggtcactgagtgtcagaggagtctcttcagaactcaagatccccaaagcctcagaagaacactctggctcctactggtgtgaggcagtgactgaggacagacagatttcgaagcagagcccacaactggagatctgggtacagggtgagttaatgtgtatatgcacctgtggggtgtgtgtgagacaggactgggtttatcaaccgaactctggaggaacgagatgaagaatagatgcaggagagacagggcaataatccaaagtctttgaaggtagaagagagttcagaaagagagtgtcttccttggactgtggaacaagccaagaccttagctggcccctcttgtatctccttatagaatgcaagattcctatatgatctgaacatttatggaagcatcgtacctagaatgcagataatatctagaaagggccagtcaggactgcacattgagacctcatctcaaacaaacaaacaaacaaacagtctctacaaagagtacaatgtatgttactagaagttaccattaggaaagctgtatacaacttgacacacacttaggagtcacctaggctgatgagaaatcttgaagataggttctttcgcgctcaactggccaggaagaacaacgctgcaacaggatccttctgcacacgtttattgggagagcttgattgtagaggcaaaaagaccccgagcccagaactggtgctgcttttataggcctaggagaggcgtctctcacacccggattggttatgcactaagcctcatttgcatgttcctcatctgattggctactctctctcagtaccttacagaacctcattatcatacctcatttgcatgtctcacatctgattggttacactctcagtaccttacagaacctcattatcatacctcatttgcatgtctcacatctgattggttactctctcagtaccttacagaacctcattatcatacctcatttgcatgtctcacatctgattggttatactctcagtaccttacagaacctcattatcatgcctgggccaggcaatgtctttgcaaaaaactttactgcatatgtacacattggttgtttgtccaatgcgtggtggccagcagtagtcagtgccactcagcaacggcacatgtggcttcccacaataggtcatatgaaagtgtcacatggaagcagtgggagagagttgtgattgtcatcctgaagaaagggtgcctcgggtgacccatgcagaggaaaattgaagcaaagatgaacaactaacacacacaaagagaaggttgaccccagagtgtacttccagaaattaaattctgccttgaaagagaacaaactggactgtttaacaatgaggcgtccacactaaagagtctcaagcagaggtagtcaagcctcagactaaagtttgcattaggaaggacgtaagagtcttcgtgccctggctgccagtgagtaccacggccacttcnnnnnnnnnnnnnnnnnnnnatgcaattccactgttggggaaatgaagacaggctgaccagtctacccagctaaattgggagagaccctgtgttaaaaagcaaagtagatggctcctgaggaatgacagccaaagttgacatctggtacgcataagcacctgctaatatgtgagcacatatacccctccatgtaccccccccaataaaaatataatatgtaaagtgaagaggcaagtcgtaaactgaaaatcattcgtagcaatacaatgtataaataagccatatttaaaacatctctagattcctgggctgacgagatggctcagtgggcaagggagcttgttgccaagagtgacagcctgagttcaatccacagtacgtggtagaaggagagaagacatgtccacaagctgtccacatatgccatggtctttgcatacacaagaatgcatgagcgtgcgcacacacacacaggtcaaagatagacatttaagagctcctactcttgcagagaacaaggatgcaatttccggcacctacagagcctgcccacaaccacttggaacttcagctccagaagatccagaagcttccggccttcaagggcacctgcatacacttggcacacagacagacaaacaggtgtacatacataaataaaactagacaaaaagaatcttgttaaagtcggtatattggcccactagtcacaagctaactgaggaaggtctcaaagggccttaggatggatgagggctgagtttgtcccgtgtctttgtgagcagtccgaggtaatcaggatagcagatctaattggatttgtcttcctagcacttagccatcctaatatcgctcctgtgagtctctttggcgtggggatttcacacttattcagaagagtttactgatcaaacctcagaggtacaaattttccacatggctaaatggataatctaacgtaaagaacaagatctccaagtaacaccttcagaggccttcttgctttctgcactgaggttgggttctgtgaaggctggtccagaggatgtggagggcatttatcaagaggttgtaagagaacaggggaaattgttagtttttcaaaagcttttttgtcctgtctaatagaaggtctgttgtgcagtttagtgaaagtctaatctaaacacaattcatttatttaacttgtcttagggctgtctcgatttctcttcctcttctgaagctgttgggtctttctaccacatcagctgcaagacttactgcctcactgccttcccccacacccatattcaaccagctcaggactccctggggccatctgcacaaaaacatacacttcttacataatggaaaagttattctaactgcttacactagacagagaaaaccgtactctcctatgcccatatggcccacttgcctagtcctgatactgttttgtcataactgactggtcatgcagccccaccccnnnnnnnnnnnnnnnnnnnnaataggcttgagctactgagacctcaaagcctgtccctacagtgacacacttcctccaacaaggccacatctccttgtagtgccactccccatgggcctatgggagctattgtactcaaaccaccacacaaaggcacacaagagtgaagaaagatttgttttttttttttttttgatgtcaggcaagaagagtgcaggtgttatttccaaagcaagaccctccctccccaagtaaacagggcatgggaagttcattcaactcccatgggaggtttatatattcactcatgtaaaggttggtccattcttaaacattctcagttaagcagtgcactctgagcatgctcactttaaactcgtgagttaagaaaagatggtagacacgtttgggggtgtgcttagccaagatggagggcatgcttggaaagttaaggtggtaggcagaaatacctcggggtatactgtgtttacattctacagttttagctgaaataaaggaaggaagactttgaagaaacattcttataggagcttgccctgaagttgtttgcctcacttagaagctaacagtgtgagggccagagtcaggtatcttttttttttccctccagtttttaggataaggttttactttgtgtccttggctgacctacatacagctcactatgtagaccaggctgggtttgaacttgcagtgttccttctgccttggcctcctgagtactgggattacaggattacagggtgaccagacagattcgacttgcatgtgcttcctgcccataacttaggtcccttaaactctgcttattcctccatcttgaatccagctcttcagaaaccaaccgcttcggaaactcctcccacagaagctctcggtcctctgcccccaccacctgcttcttctgctgagcagccaagattctcctccccagacccccaccttcatcaccagatgcagcttcttctcaaacaaatacaagatgtaagagctctcctcggtcatctggtcatggagctgagggacttgtctgtctacctgaagcctggtaccacgaaggttgctgacaaatgaaagtgagctattcacctgcgctatattcaaccaccgcaataattccagctctttctggactatgcatatacaggcatagttttgcaagctggtttgatacttagttaaactaatggaactgttcgagtgtaaataaatgcatacagggttatacccagaatttccctataactatgttttctttagccatgacaaagtcattttgcattctagaccaggaatttctttctgttgcctagaacagaatttaaagagaaataaaaacaaaaaaagtggattttgtactgcaatttcaactggaggggggtaatttctcttctctatattcccatggaaacatttagcagtgtctcctagacagttgggtttcacacagggtgagaaggatgtctgtgctggtagaatttaatgagttaaggcatttacaagccaaggaggctgataaccatcctataatgcataggacaacccttttccccaataaaaaatttcctgtcccgaaatcttattaatgttaaagttatgaaatataagactaataaaagctaggtgtcaatgtgaggcttcatctctcttaattactctccctcaaaaactattaattatatgctagtgtttaattaatcctatggtttagatttttataggcctcctcctccaaatacctatgctgaaatcttaaatttatgtacatgtatgtgtgtaagtcctgtggaggccagaaagtgggcatcagatcccctggagctggatttcaaggcagttctgagctgcacaatatgggtactgggaaatgaactcctactctctggaagagtagcaagcacccttagtccctgagttctctctcagcagcagcacctaccatgctgaaatattaatccctaaggtgatggcatgagccaaaggagccttgggaggtgtttaggtaatgagaacagaggtctcaggattagggtcagtgcctgtagaaaagaaagcccccaaagctaatgaatccattgcttttgtacactctgaccaaaatgaatgacagaaacgacttaaggaggaatgggagctgccttatggtaaggaggaatggaagtgtttcatggtttcagaggttttctgtccatcatggcaggcaagcctagcagcatgaatcagccccagcaataagagtgtgtgttcacattgtggtaggcaagaaagagcgagccatggccagaaccaggagaagttataaccttcagaggcctactctcagtggtttaattctgccaactaggctcttcctcctaaaggctccacagccttcaatatcgtgtcaaatctaggcaccaaacaaaacatgaattctaacattccacctctggctccaaagtcatacggccacctcataagataaagaacattcatcccaacccaaaagccactgtaattttaacagacctaacattattaagaacctctcaagtgtcttttctactgctgtgataatataccgtgaccaaggcaacttccagaagtgtggtagtttgagtagaaatggaccccacagactcatgtgcgtgaatggttggcttatagggaacggtactattaggaggtgtggccttgtgtgaggaagtatgtcactatggggatgggctttgaggtctcatatatgctcaagctatgcccagtgtgggacacagtctcctcctgctgctgcctgggaatcaagatgtagaactctcagctccttctccagcaccgtgtctgcctggatgctgtcacatttcccaccatgatgataatgggttaaacttctgaaaccgtaagccagcttcagttaagctgtgggcatgatgtctcttcccagcaataaatctctaatgcaagaagggagagtttgtttggggcttatgggtctagaggaataagagttcaccattatcatggcagggaggcctggcagccagcaccaagtatagtggcaggattagctgagagcttacgcaggacacagagaccatgaactcaaaatgtcatgattcttttgagtctcaaagcctgcccctcagtgacatacttcctccatcaaagtcacatctccccagacaatcactaactggggacccagcattcaaatgcccagactaaggataacatctcatttaaaccaccannnnnnnnnnnnnnnnnnnncactctgaccaaaatgaatgacagaaaacgacttaaggaggaatgggagctgtcttacggtaaggaggaatggaagtgtttcatggtttcagaggttttctgtccatcatggcaggcaagcctagcagcatgaatcagccccagcaataagagtgtgtgttcacattgtggtaggcaagaaagagcgagccatggccagaaccaggagaagttataaccttcagaggcctactctcagtggtttaattctgccaactaggctcttcctcctaaaggctccacagccttcaatatcgtgtcaaatctaggcaccaaacaaaacatgaattctaacattccacctctggctccaaagtcatacggccacctcataagataaagaacattcatcccaacccaaaagccactgtaattttaacagacctaactatgtcactatggggatgggctttgaggtctcatatatgctcaagctatgcccagtgtgggacacagtctcctcctgctgctgcctgggaatcaagatgtagaactctcagctccttctccagcaccgtgtctgcctggatgctgtcacatttcccaccatgatgataatgggttaaacttctgaaaccgtaagccagcttcagttaagctgtgggcatgatgtctcttcccagcaataaatctctaatgcaagaagggagagtttgtttggggcttatgggtctagaggaataagagttcaccattatcatggcagggaggcctggcagccagcaccaagtatagtggcaggattagctgagagcttacgcaggacacagagaccatgaactcaaaatgtcatgattcttttgagtctcaaagcctgcccctcagtgacatacttcctccatcaaagtcacatctccccagacaatcactaactggggacccagcattcaaatgcccagactaaggataacatctcatttaaaccaccacactctaagtccagcatccagggcatagagtcatcatgtgagcctcagtgggcttgggcagccctgcccctatggtcctgatacttgcagcacacgtatgctctctctgtccaattccacttggtgcttgcagcttttcctggtagatgttccacatctggtatctccaacatcctgaggtttccattacaattaggcttcgccctcacagctgtacacatactcctctcagggnnnnnnnnnnnnnnnnnnnntgggcatgatgtctcttcccagcaataaatctctaatgcaagtaaggagagtttgtttggggcttatgggtctagaggaataagagttcaccattatcatggcagggaggcctggcagccagcaccaagtatagtggcaggattagctgagagcttacgcaggacacagagaccatgaactcaaaatgtcatgattcttttgagtctcaaagcctgcccctcagtgacatacttcctccatcaaagtcacatctccccagacaatcactaactggggacccagcattcaaatgcccagactaaggataacatctcatttaaaccaccacactctaagtccagcatccagggcatagagtcatcatgtgagcctcagtgggcttgggcagccctgcccctatggtcctgatacttgcagcacacgtatgctctctctgtccaattccacttggtgcttgcagcttttcctggtagatgttccacatctggtatctccaacatcctgaggtttccattacaattaggcttcgccctcacagctgtacacatactcctctcaggggctgtctgcagggaatctgaccatgcatggtatgtatgcattgccttgcttcacggggtgcaagctgtcatgactcctgtagtgcaaaaccagcaccatgtaggtgacaccaagattctgctgacagctggaaggtagccaggcttccttttatcatgtttgcagtgggcaactcaatctataataacacttccctacatggtccgtttccagctgggtccttaagaacgtctctcttttaggcccccttttttcccaggcactgggagaaatttctccttacagcatcttctctattatctgtttggcttctctttagtgatgcttatatctgttaagaccttaatgtatcccacattactttcctacaactttaatcatatccacactcctttgttctatgcttggattactgttgtctgttctcaaatgacgagacctagtctgacaagttatgtaaccttgcttaatgtagcctttggttgatgaattagcataccatgttattgtggccttagtgagccaagaatactcacatcatcctgtattcccactgtggcctttctttgtactatttgttttgtatgctgtagcctgaaataatttacaaatgtatacatgatgattttatatatactacaaaaaaaaccaaaggaataagatcacactgatggttagtaaagtttagcatctttaagaatgggatgattggtcttgactgtcaacttgattagatcttgaatcaactaagagtcctgcttctgggtgggtctatgaggagaagacataagaactgtgtgccaatttattttttttaaggttgaacatgcaggggatgaagaaatggtttagtggttaagagcactggctgctcttccaggggacctaggttcaagtcccagcaaccacatggtggctcatgaccacctgtaactccagctcactgtcccacattgtccctgagaacattcctcttaccacagtctgtatcagatgatgttgcatcttgtcaggacgtactgttgtgacagatttcaaagacttcaaagaactactcaaacccactgttgtcccagcaccgagagggctgaggaaactagaaacactttagcccacttgagagtttgagaccaggctgtgcaggatagcacacccttaacaaggaaaaacaaaacaaacccaaagtaacctaatactttccaaacttgtctgcatactaaaagccttagcagtgtgcaaagcatcaaagaattaaaatcctatgggaagggtcctgcgtagagaaaaagacccacttgagaaaagttcagagggaagtggaataagcgggtgttgggcaggatgctttttggatccagttccaagcattatctgaatggctaatgagctccgaggccgattcctataagttcaagaaagacgacacagctcatgaagttttaatgtgatcaggtttcttctggaacccaggcaagggactgggatcttggttctgacttatgagaagccaaatagtctgcttgtgtagactctgcgaacttttactgtagaggtggtgggccgtgcagaagtcagaccgtggggacaggctgtggttgatgtgaggaatcccacactggtcccaagatgaggaggcaggcagggctgtagggaagcacatgagtgctgcctaaatgggcattcatctcggctctctccggttccctcctcccctacgctggctcaccttatcagataccatcctacttttcagacctacatgataactctctctctccctttccctctccctctcccctgtcctctgtctcccttctcccaatcaaatcatgcttccaaagcaagatccaaaaaggtcagcataattgaagactggccatgttttcctcagatgcatttgtattttaacagggaaaaagcacactgcactgaaaatatgagggaattctcagaggaaaacttggtgcctcagcaaaactgaaggatgggatcttggagagctgactgtatctgaccactgatctccttcctgctagggttccaaggaaggcagatgtcctggttctaaacagccgccagtgcagacagggcagagctcagggagacatactatcaggttggaaacttcattaaatatttacttgaaacttgggctcttcattgctcaggtgtggtcacgtggctcagaggagcgaagcagagaggtcggatttgagaagcctccgaggggctcatgcagtcagtggcctctctcccaggccatagccctgtggactaggacttggctggggaagggtgttagggtcagacggaaggcaagaagaaaggagcaagcaagtgaaggtaccataatagcgcaagatcattgtgggtggggagggaagaagtgtttcagattcgaggaagggaggagaagaaaacactttacacttctggtttttacttggggaacaacaggtcagcaggagcatagcaggatgaatgaatcacgcctttctgtctacccatgtgtgggaggatgtaagctctgcttcggaacacacaatgacctctctaggcctcacaccaagaatacctgtcatcagggattaagcaggaataagatgggttttatgaacatcagtgggactggctaatagggaaaggttggggtgggagtgggatattgatggacccaatggagactggggaatctatgtgactcttgtgagtggtagaagtcacagctctatagggcttctctatagaagtcaaggctgggctgagctggaacatggctacagaggggtagataggacagtgcttgatgtttggggtaggtgagtaacacactcaggtgacatcctggtctttgtgttccaccatcttgaggaagtgggaatggacagaagaagcaacagtgtctcccagttcccaatgtctgcttccatctattttttttctctctgccccgcctccatgcctccaacctctaccgagcctgcaggcagagtcattatgtggatgcttgcagccctcctgcttctgggtgagtcagtaatgagggggcatcagcaggatttggggagggggagagtatgacagggcagggttatgtgggataagagagcagccacctttgctgacctcaggtttcatatggttctctgtctgccttgggatgatgaaatagagctagctttctcaaagctgggtaatttggtatggacaaaggaaactcaggctttcccaggatcaagagtctttcctgtcactgaggacagtcctcaacctcttccttctttcttgctttgcagttccaagaagtggaaaagctggtaagccttatacatctctcatccaagttttgatgagttccacgagggtagatgccccagttcctggctgttctgagatggtattcccccccccactcttgcccaatcttgatgactaaatgttcttgagcatagacacggtcagaaatggcttatgattaatagattccttgtctgcagcctcatgtctgtggtctccctcattgccagggttggttcctctgtgggctgggacccagaaactggtgtttcccaacaattcccaatcctgggactttatttttgggcaggcacctcatcttactttacttcctcacacggccccatccccccccatccccagctactctggagaagcctatactgactctacacccaccttggaccaccatcttcaagggagagcgagtaaccctgagatgtgatggataccaccctctgctgctggagctccggcccattagcactctctggtacctgggccatgtcctcctgccttcccacaagaagagcatcgaggtgcaggcaccaggggtgtatcgatgtcagacacgaggagcacccgtcagtgatcccatccacctctctgtgtctaacggtgagtgctggccctactggcagagtagacatccggctattcccaggggacaagaagaaaaaaaaaaggtcacacagaaccaccttgagtctctggagtaggcagaagcctgcagtaaagatttcctggtccaaaagccacccccctccccgtcttcctgatggagcatgaagcaaattaatattattaatttattaagtggggtgacccggtttcagaaagtcaaaaattgtgctctcctgacactactggaacccagaatcctaagttccccctcctctgtctctgtctctgtctctctctgtctctgtctgtctctctctctctgtctgtctctgtctgtctgtctctctctttgtctctctctctgtctctctctgtctctctccctctgtgtctctctctctctctctctctctcggatccctgactggcctggaactcactgtgtatactaggttagccttgaactacaaggatttttttgtgtctgcctcttgaatactgaggtaaaagccatgtaccacacccaaacagggtcctgtttgcatatttgttttggtttgttcttttgctgtttctctaattttttttttttttgagacatagtctcattttgtagcctaggctggctggcctggaacccacagagatcaacctactgcccccttctaagtgtcttccaagcgctaagattaaagttgtgctccaccacatcagcccagccaggattctgagttttaatgtctatgtgaatataaataaagggattgaaactgggggttgtttcatggcactagactggaggccaagtgaggagaacaagaggtggagaggaggtgtgtcaaaatgccaatgccacatgtaaatctccatagcgagagaggctaccggaggtgggaggtggcagggtacaaggaagagaagagggacggagatgaaggggaggaaacaattaaagatgtgtttgtttgaaaaatgatctcataattaaagttaattatttgtgatctttaaaaaaaaaaaaaggtagccagtaattatgcacctgtaatcttacactcaggaggctgaggcaggagaattcccacaagtttgaggccagcctaggccatatagcaataccctttctcaaaggtctttttacaaggaatgaaataagaaaaagagagatgaggcagaggaagagacgggggaagaaggaaggaagacaggtgggggggattggacaaagaacttaataaaacttctgctgttggcacatatacatgagcacctaggagtcgatcaaggagcaactgtctcgaaatatttgaagcgttttagaacagggatgagaacactgggtgtgatggtgcaggcctgcagtccctgcacccaggaagcagaggcaggaggatgagtgcaaatctgcagcccagccagggatacatagtgaataacagcccgtattgaacaaataaacaaacaaacagaactgccaccaaacaacaacaacaacaacaacaacaaacgggataggaaaagtaataatggtatacccatcaaagtacataattagctgcgtcatgtggaggattaataatctttcctgggcagatgttcatttttattaagcatttaaagaacaccagtcagtgtttcaattagcattctacacttgtagaggtttcctgttggaggtcattaaagtggaagcacggttggccatagctgacagacagactgtggcacagaaactgcgactatgccttgcaaagctttctggacacagggtctcctgcatatgcagcccaggcatgccttggttttcaaccctcccgctccagctttccaagtgctgggattaccggcatgcaccagcatacctggccagtggaattctctttgttagggaagaatagctacaatgagggctggagagatagctcagcggttaagaatgaatcgtgctctgggacagaacgggacatcgggtcataaccacctgaaactccagactcagaggatactgcaccctcttcttgcctcctctgacacttgcacatacactcacgagaacacacccacctggacatgtacacacacctaattccaaatgaatgaatgaatagatgaaataatttaaaattttatgataccaaaaatggcatttagggtgccctaaggatagtgtcagctgcagtgatgatgatggtggtggtgatgatggtgatgatggtgatggtggtggtggtgatgatagtgataatcgtggtggtggtggtggtggtgatggtggtggtgatgatgatggtaatcgtggtggcacattcaagacgctgtaggatatatctaaggctgttctcagagaagcttccttcagaagataaggcctaacaggacctactggtctgaatttaagctgagaagcagtgtcttttgggttgaggaaatagctttacaagggccttgggttctatacagaacctccccccccccccccgagcagttcagtgtgattgggtctagcttgtgttgaatgaaaggtgaggcaagctaaaaagaaatggggtcagggaagaggttatcaggggctaggtcaggaagggcttgaagtcatactgtggggtctatggttggttttgaaaggagactctatggggctggaaccaaatctgagacatctttgcttccttggtatcgttt

SEQ ID NO: 3378 - DNA, 1636 bp, Mus musculus
ggtataaacccagtcaccatgaagctgagctgcacgctcacacagtgggccctttatgtctgtcctgctgtcctggcaatccagatgttactggcagctgccagtttagagactctgaagtgtgaaggacttgtcagcactgagcaaggcagctgccaggctgctgctgaggaagatgagggtgatgaagatgatggcgatatgacccaatccagtgaagctgacttccagttcaagggctacacattcagtaaacctttccatctcagcgtgtcctatgactggctgatccttcaaggtccagctacattgatatttgaaggagacacattggttctgcactgccgcgcctggcaagactggccactgactcaggttatcttctaccgagagggctccgccttgggtcctcctggacctaaaagtgaattctccatcaccatggtgcaaaagtcagacggtgggcactaccactgcagtggcatcttcaggagccctggtcctgggagccgagaggctgcatcccctgtggctatcactgtccaagagttgtttgcagccccagttctcaaagccttaccttctagtgagccccaagagggaggctcagtaaccctgagctgtcagacaaagctggccctgcagaggtcagcttcccgcctcctcttctctttctacaaggatggaaggtcactgagtgtcagaggagtctcttcagaactcaagatccccaaagcctcagaagaacactctggctcctactggtgtgaggcagtgactgaggacagacagatttcgaagcagagcccacaactggagatctgggtacaggctcttcagaaaccaaccgcttcggaaactcctcccacagaagctctcggtcctctgcccccaccacctgcttcttctgctgagcagccaagattctcctccccagacccccaccttcatcaccagatgcagcttcttctcaaacaaatacaagatgtaagagctctcctcggtcatctggtcatggagctgagggacttgtctgtctacctgaagcctggtaccacgaaggttgctgacaaatgaaagtgagctattcacctgcgctatattcaaccaccgcaataattccagctctttctggactatgcatatacaggcatagttttgcaagctggtttgatacttagttaaactaatggaactgttcgagtgtaaataaatgcatacagggttatacccagaatttccctataactatgttttctttagccatgacaaagtcattttgcattctagaccaggaatttctttctgttgcctagaacagaatttaaagagaaataaaaacaaaaaaagtggattttgtactgcaatttcaactggaggggggtaatttctcttctctatattcccatggaaacatttagcagtgtctcctagacagttgggtttcacacagggtgagaaggatgtctgtgctggtagaatttaatgagttaaggcatttacaagccaaggaggctgataaccatcctataatgcataggacaacccttttccccaataaaaaatttcctgtcccgaaatcttattaatgttaaagttatgaaatataagactaataaaagctaggtgtcaatgt

SEQ ID NO: 3379 - protein, 356 aa, Mus musculus
GINPVTMKLSCTLTQWALYVCPAVLAIQMLLAAASLETLKCEGLVSTEQGSCQAAAEEDEGDEDDGDMTQSSEADFQFKGYTFSKPFHLSVSYDWLILQGPATLIFEGDTLVLHCRAWQDWPLTQVIFYREGSALGPPGPKSEFSITMVQKSDGGHYHCSGIFRSPGPGSREADVAITVQELFAAPVLKALPSSEPQEGGSVTLSCQTKLALQRSASRLLFSFYKDGRSLSVRGVSSELKIPKASEEHSGSYWCEAVTEDRQISKQSPQLEIWVQALQKPTASETPPTEALGPLPPPPASSAEQPRFSSPDPHLHHQMQLLLKQIQDVRALLGHLVMELRDLSVYLKPGTTKVADK

SEQ ID NO: 3380 - DNA, 27382 bp, Homo sapiens
ttcatccctgggatgcaaggcttgttcaacatacacaaatcaataaaggtaatccatcacataaacagaaccaatgacaaaaaccacatgattatctcaatagatgcagagaaggccttcgataaaattcaacatcccttcatgctaaaaactctcaataaactaggtattgatggaaaatatctcaaaataatcagagctatttatgacaaacccatagccaatatcataccaaatgggcaaaagctggaagcattccctttgaaaaccagcacaagacaaggatgccctctctcatcactcctattcaacatggtattggaagttctggcccaggcaatcaggcaagagaaagaagtaaagggtattcaaataagaagagaagaagtcagattgtctctgtttgtagacgacatgattgtatatttagaaaaccccattgtctcagccccaaaactccttaaggtgataagcaacttcagcaaagtctcaggatacaaaatcaatgtgcaaaaatcacaagcattcctatacaccaccaacagagagacagccaaatcatgagtgaactcccattcacaattgctacaaagagaataaaataccaaggaatacaacttacaagggacatgaaggacctcttcaaggaaaactacaaaccactgctcaaggaaataagagagtatacaaacaaatggaaaaacattccatgctcatggataggaagaatcaatatcatgaaaatggccatactgcccaaagtaatttatagattcaatgctattcccatgaaactaccattgactttctttgcagacttagaaaaaactactttaaatttcgtgtggaaccaaaaagcagcccgtatagccaagacaatcctaagcaaaaagaacaaagctggaggcatcatgcaacctgacttcaaacaaaactacaaggctacagtaaccaaaatgcatgatactggtaccaaaacagatatgtagaccaatggaacagaacagagaccttagaaataatgccacacatctataaccatctgatctttgacagacctgacaaaaacaaacaatgggcaaaggattccctatttaataaatggtgctgggaaaactggctagccatatgcagaaaacagaaactggaccccttccttacaccttatacaaaaattaactcgagatagattaaagacttaaatgtaaaaatctaaaaccataaaaaccctagaagaaaacctaggcaatgccattcaggacataggcatgggcaaagacttcatgactaaaacaccaaaagcaatggcaacaaaagccaaaattgacaaatgggatctaatcaaactaaagagcttctgcacaacaaaagaaactatcaccagagtgaacaggcaacctacagaatgggagaaaagttttgcaagctacccatctgacaaaggtctaatatccagaatctacaaggagcttaaacaaatttacaagaaaaaaacaatcaaaaagtgggcgaaggttatgaacagacacttctcaaaagaagacatttatggggccaacaaacatattttaaaaagctcatcatcactggtcattagagacatgcaaaccaaaaccacaatgagataccatctcacaccagttagaatggtgattattaagaagtcaggaaacaacagatagagaaacaggagcgcttttacactgttggtgggggtgtaaattagttcaaccattgtggaagaagacagtgtggtgattcctcaatgatctagaaccagaaataccatttgacccagcaatctcattactgggtatatacccaaaggattataaatcattctactataaagacacctgcacacatatgtttattgcagcactatttacaatagcaaagatttggaacccacccaaatgcccatcaatgatagactggagaaagaaaatgtgggacatataaacagtgggatactatgcagccataaaaaaggatgagttcacgtcctttacagggaaatggatgaagctggaaaccatcattctcagcaaactaacacaggaacagaaaaccaaacaccacatgttgtcattcataagtgggagttgaacaatgagaacacatggacacagggagggtaatatcacacaccaggctctgtcagggggtaggggtaaggggaagaagagcattagaacaaatacctaatgtatgcgggacttaaaacctagataatgggttgataggtgcagcaaaccaccatggcacttgtatacctatgtaacaacctgcactttctgcacatgtatcccagaacttaaagtaaaataaaaattaaaaaaaaagaaattgaatttattatcaaaactttcctgcaaagaaaacttaaggtccagatggttttactgccaaattctaacaaacatttaaggaataaataataccaattctataccaagtcttccagaaaattagggagaaaagaacactttgcaactcagacatccaggcaaaggcatgaaaagaaaccaaacctaggctgttccaagtgcagtggtgtttacaactaattgatcatgaccattaacagatttctttgttccttctccactcccacagctccattttaatagcctttaaataaaaagtattttaaaaaataaagaagaggccaagtgcggtggctcacgcttgtaatcccagcaccttggaaggccaaggcgggcctatcacttgaggtctagagttagagacctcgccaacatggtgaaaccccatctcttctaaaaatacaaaaattagccaggcgtggtggcaggcacctataatcccagctactggggaggccaaggcaggagaatcgtttgaacttgggaaacagaggttgcagtgagccgagatggcaccactgcactccagcctgggtgacagagtgagactctgtgtcaaaaatgaataaatagaatagaataaaaataataaaaaataagaaacaaagcctagagaccaatatctcttatgaacatagatgcaaaaagttttaccaaattttagcaaacaaattcaatattatataaaaggataatacatgttgaccaatacaaatttggaccaattcaaaaccaatgaatgtaatttaccatattaacagatttaaaaagaaaaaaaacccatcatttcaatagatgcataaaagcatttgataaagttcaatacccattcatgataaaacaaacaaaaatactcacaaactctcagtaaactaggaatagatgaaaacttccttaaccttataggggacgtatacaaaaaacacatctaacatcatacttaagtgaaagactgcaggctttctccctaagactggaaacaaggcaaagaagtctgctctcactgctcttatgagcatagttctgaaagttttagccactgtagtaaggcaataaaagaaaatttaaaagcatacagatcagaaaggaagaagtaaaactgtccctatttacaggtgatatgatggtctatatagaaaattccaagtaatctattttgaaaaactcctataactagtaagtgagttcagcaaggttacaaagtcaatatacaaaactcagttctatttctgtataccaacaatgaacaatcagaaatgcattttaaaaatatcatttataatagcatcaagaatatagaatacttaggggatatatttgacaaaagatgtacaagacctatatgctgaaaactgctgaaagaaattaaggaagacttaaataaatgaagagaaatgttgttttcatggatcagaagatttggtattgttatggtgtgaattctttccaaactgatctatagaatcaaggtaatcctagtcaacgtcccagcaggcttaaaaaaattgacatgctgattttctttatctatttatttttattttttttgagatggagtcttgctctgttgcccaggctggagtgccgtggcataatctcagcttactgcaacgtccatctcctgggttcaagcagttctcctgcctcagcctcccaagtagttgggattacaggtgtacgccaccatatccggctaatttttgtattttagtagagacaggattttactatgttgattaggctggtcttgaactcctgacctcaagtgatccacccacctcagcctcccaaagtgccgggattagaggcgtgagccaccacgcccagccatgacatgctgattttaaaattttatggaagtacaaacgtatttatatgaaaatttaaaattcatatggaatcgcttttttaaattctgaaaaagaaaaacaaagttgaggaagaacgtctagaaataggatcaaatatatatgatcaattgatttttgataaagatgctaaggcaattcaataagggaagtataatcttttcaacaaatcggtgctggaacaattggtagccatatgtaaaaattaaacctcaacccttaactcacatcatatatgaaaatttacctgaaatgaatcatatatttaaatgtaagagctagacctgtagaaaatggtaggaaatcttagtaacctcagctttgggagagatttattaaataggaaacaaaaatcatgatctgttaaagaagaaattgattaattggacttcataaaaatgtaaaatgtggctgagtgcagtggctcatgcttgtaatcccagcactttgggaggctgaagcaagaggaccacttgagcccaggagctcaagactagcctgggtaacatagtgagattccgtctctaaaaaaaaaaaaaaaaaacaggtgtagttgtgtatatatgtggtcccagctaatcaggaggctgaggtgggaggatcacttgagcccaggaggttgaagtggcagtgagccatgatcatgccactgcactccgccttgggaaacagagcaagaccccgtcacacacacacactcacacaaagattgttttttaaaagataatgataagaaaatgacaacacaagtcacagactgagagaaaatatttgcagaacatctatctaacaaaggacacatatctagaatttttttttaaaaaacctcaactcaataagaaaacaacccagtttttaaacactggcaaaagatttgaattgattctaccccaaaatatatatgcagttagtaaataaatacatgaaaaaataaacatccttattcattagagaaatgcaaattaaaaccaatgagctgtaggaaacaccagttagaattgctaaaagtaaaaagactgaccataccaagcatcattgaggctgtctagcaactggagctctcatacactgctggtgggattgtaaaatggttcaaccattgtaatggttaactatgtgtcaacatgactggattaagagacgctcagactgctggtaaaacactatgtctggctgtgtctgtgagaatgtttacggaagagggctgggcgcagtggctcacgcctgtgatcctggcactttgggaggccaaggcagatggatcacctgaggtcagcagttcgagaccagcctggccaacatggtgaaaccctgtctctactgaaaagtacaaaaattagccagggttggtggcgggcgccttcaatcccggctacttgggtggctgaagcaggagaattgcttgaacccaggaggtggaagttgcagtgagccgagatcacggctttgcactccagcctgggtgacagagtgagactctgtctgggaaaaaaaaaaaaaaaaaaaaaaaggaatatttatggaagagattagcatttgaattggaagagtgaataaagatctgtcctcacaaatgcatgtgggcatgatcccaccactcagggcctgaataaaacaaaaagatggagatagggcaaatttgatctctctgattgagctgggacattaactgccctcagacaccagccctcttggttctgagtcttcagacttggactgagacttattgactccactgattgtcaggcctttggacttgaactgaattacaccattggttttgttggttctccagcttgttgatagcagagggtgggatttgtctgcctctaaaattgcctgagtcaattcctgtgtttccttgtatgcatatattaattctgtttctctgaagagccctggctaatacaaccaatttggaaaacagcttggcattttcttaaaaaattaaatatttttaatttttaaagaaaaattaaattacctacataaaatttaaaaaactacctaaaaatacacctacacctatatgatccagccagtccactgctaggtacccaagataaatgaaagcctgtgtccatacaacttgtacatgaaagtttatagtacctttatttgtagtagccgtaactggaagcatcccaaatatcaaacaataggtgaatggataaacaaagtgtggtacagtcatgtagtggaatattactctgcaataaaatggaaagaactgttgatagacacaacaacatggactaatctgaaaataattatactgaatgaaagaagacagacaaaaagagcacatgctgtatgatttcatctatgtaaaatctcagtaaactatagaaaacttatcatgacacaaaacagattagtggttgcctggagaaggtggatagagaggaagggattacaaaagtgcacaagtaaattttcaggagtaattcatctgcttattatcttgattgtggtcatgttttcataggtacacacttttgttaaaattcatcaaattgtacaatttaaagatgtgcatttagcgtatgtcattatttctcaataaagtgattttacaaacacaaaatgaaaagacaagccataaattgaaaaatatttgtaacaaatatgactgacaaaaaatttatgtttaggacatatacaatctcttaaaagtcaataagaaaattccattcatatatgtaccttcgagaaactcttataataacaaattatgtacatgaatagatgcatggtttttgacagcaaaaacctgaaaataactcacatgtccattgtcaatagaataatttgtgacatgatcacatgatgaaatacttcacagcaatacaattagttaactatagctacacagaacatcaggttgtatttcagttgagttaaacgaaagcaagttggctgggcaaggtggctcacccctgtaatcccagcactttgggaagccgaggcaggtggatcatgaggtcaggagttcgagaccagcctggccaatatggtgaaaccccgtctctactaaaaatacaaaagttagccgggtgtggtggcacacgcctgtagtcccagctactcagctactcgggaggctgaggcagaagagtcgcttaaacccgggaggtggaggtttcagtgagctgagatcaaacatactgcactcactcaacagagtgagactccatctcaaaaaaaaaaaatagagaaagccttagaatgataaatacagtacaattccacttactaaaagttcaaaaatacaaaatgattactacataaaataaagagagtgataaatataaggtaaagattgtggttgatgatggtggggagggaagacagtgtaatcggacagggatctatgcagtacttcaaggataacagtactagtctgttccttcaaccatataaggtttcaaaagtatacactgcattattttttacaccttcacatttttaataaatatttttatctactcaattaaaaataaagaagagataagcattagtccactagtgacaagccaggaatggcaaaggagggcatccaccacctaattggtcttgggatgggatgagagctgggatttgtcccatctccccctgagtattctgaggtgatcctgatggaggaacttactcaataaaccgaatctcagtctccatgaacaaacagcagacccaatgttgctttttcctcgcagtgaatcacatctattctaaatagttcattgattaagcttcaagcgagtaaattttcccagcagcttaatggaaatttcagtgtaaagaacttgatagcttcaccccaaatcttcagaaggccccttgccttccatattgacagtggggtcctgcaaggattgctgcagatggtataggggagggtctctatccaggtaagatgctatggtaaggacagtaaaggagaaagggtgacataagaagagaaagatatcatgatttgtttagaagccccttagcctctgcctaaccctgagggtctatgttttatgtagttttaggagtggcgatgcatctaaacacattttatttgtttaattcgtacacctgtaatccagcactttgggaggccgaggtgggcagatcacgaggtcagaagatcgagaccatcctggctaacagggtgaaaccccatctctactaaaaattcaaaaaattagccgggcgtgatggcacgctcctgtagtctcagctactcgggaggctgaggcaggagaatggcttgaaccctggaggcagaggttgcagtgagccgagatcgcgctactgcactcaagcctgggcaacagagactccatctcaaaaaaaaaaaaaattattaaggctagctaggcttttcttcctcttctgaggcttcacatcacatcagctgcaaggcttactgcctcactgccttccccagcacccatattcaaccacccctggactccctggggccacctgcacagaagcgtatgcctctcgataatggaaattttattctaaatgcttattttagactcagaaagatccactctcttatgcccgtgtggttgatatgtctgctctgacctgtggtttttgcacagttgaagggtcatactgtccctctctctgccttcaaggaggaccaaactaccttcccccatttctctctctctctttttttttttttttgtgagatggagtctcgctctgtcacccacactagagtgcagtggtgcaatcttggctcactgcaacttctgcctcctgggttcaaatgatactcatgcctcagcctctgaagtaactgggactacagccatgcaccaccatgcccatctaatttttttttttttttttcagtagagatggggtttcaccatactggccaggctggtcttgaactcctgacctccagtccagtgatccgcccaccctggcctcccaaagtgctgggattacagaggcatgagccacagtgcctggcctaccttaccccatttctgatggctcatttcatctccaaataacctactggaggcctggtgggtgttatgatgacagaaaggggaggaatgtggccactgtgaaaagacacatgggccctaccattaagtaggcctcaaacaaatagcaaacattcagaggcagggacaatggttcccaggaggccatctggaacggaagggagaggctgtagcctctatattgctcctattcctgagtctcctcaggtttctcaagatatcggatgcctcctatctctaatttcctcaggatcagtggcctgagctttggctatgagcctaagccctgagctgactgctggatcctctgggaatagattttctttttcctctactctttcccagtggactctccctgccttgtactcatatttccactgagactgagcagacttagtcatgctccagaaatagagagctgacacgagtctagagaaatttgcatgcaaatttgtgtgggctttggatagtcagagcctactagagactaatctgatatctaacttggtgccatgactaatcttccttctctgtctcgctaccttctagtcactagaaacatataagtgttggaatgggcaggacatttgaattctcatcattgattctccagtgattttctattggccttcaaacaacatcccaccttctgtccccagttgcatcaccagtgaaaagggtggttgttgcactgacctttcccagagtgtacatgaaggccagctggctatcagacaatgacatgctttgacaggcccctgagctctgtgagtaaattcttgaacagctgagagtgctaccattttgtcatagccctaagggtgcagatgatgctgaaagcgtgttggccaaatctgaatgatgaaagccaattacaaactagaaaatgaaaacagaccccagatgcaaggagatgagacagttaaatttacttcctcttttctaatctgagaggtttcatgttgaagaaaatcagtgttggggttgcaggagacctaaacacagtcaccatgaagctgggctgtgtcctcatggcctgggccctctacctttcccttggtgtgctctgggtggcccagatgctactgggtaagtaaaatatttgaatattggtgtgggaatggagctttgcttaccttgggagaaaggaccagaaggaaagaaacatggactaattctggccctccaaagaagcagtattcaggtggaataagaagggtaggtataagaaagtttggtgtacaggattgaattactttctgaatataaaaatcttccatcctgaaagtcccctctgatcatgatatcctctctagctctaatctcaactcttttctttcacttatgagacaagttttcttaaaagaatagtttgcacttgctatctccacttcctcacttctcacacgctcctcaatgcttgcagcctggcttccactggaattggttttgtctagggcacaacgatctctatattgactgggttatggcatgcttttcagttcatatcctgctggacttctctgctgcactgggctctgttgatcacttactccttcttgcattctctactaccctggcttccatggcaccattttctccttgtactacatggacttctcttgatcccttaatagcttctcttctcttccccttaaacactagtgttctctatagttatagccttgcctctgtactcctctttctttacacaatctccttcatgagcttatttgtctgtttaatttttgccactataactctgtatttaagagtcccaaatcatatccccaaccctaaccatgcttttgagcttcacattcaaatatcaagcttcataccagacatatctacctacatatctcacaagtgtctctgcaccatgtgactagagttgaacttatctgtccttttggcccctgcctcatctaattcattttccactttctgatctcagctaatgacaccagcatctacccttacaaggccataaacctcagaaacaacccagactcttccttctttttcattctctaaatctgatcaatcattaggtttggccaattttaccttctaaattgttcatagaagcagtcccttgcctggatcatcactaatgtcttaggacaagccctcatcctctatgacttgggctattccagtaaattcctaactaatctcctcgtccaaaccttgtgttcttgaaatgaattctgtaccctgcagacagagtaatttctaaaactcaagtttaccagcccaaattctttatcatggcacaaaaggccaagcagcctctacttttaccctctcagccttgtaacttatgctctaataaatctcaatcagttcatatttacatactcacacaccagactcttgcctgtctctaaggctttgcttataccactatctctacctgaaatgagttctttccatggcaccctactctccttctccttgcaaatgtgtaggtacccctaaagactcagcttaaatggtatcttttccaggtagcttttcttgaatgcttctttctgctccaatggctgcttgcgatacatttttcttattataatattttcctacttatgctgaaataatattttcatctacctgtgtcttccactaaattgagagctatttgtgggtagtgacaatgtttttttgtttttgtcttgtgataagaactgcagacttggaatcagatactcctgtttcaagcccctcttctatttaccagctctatgtcactttagaaaatcactttttctatttctggttcagttttctcatttgtagaatgaaaataataatacctaccacctaaggtttattgagtgagttcccagtaacccaacaagattttattttattttattttatgttttgagacagggtctcgctctgccacccaggctggagtgcagtggtgcaatcactgctcactgcaaccttgacctcttgggcttaagcaatcgtcctatctcagcctcccaagtagctgggaccacaggcaagtgccaccaggcctggccaattttttaaaaaattatttgttgagacagggtctctctatgttccccaggctggtctcaaactcctgggctcaagggatcctcccacctcaacctcccaaagtgctgtgattataagcatgagccaccacgcctggataagattttatttttaaaaagaaaaaatggagaggaggcagagcacagatgagtgacagtggaggaactgaaaagaggtagcattacagtgaagggagcggagaaaggatggaaagaaaacacctggtactgatgtgatgagaattaggaagtagggaggggtcttggtaagggacatgacaaaatcaaagaagaacgctgggctattgggagtggaagagaataaaggcaagtggggcacgaaatgacagtcagatggagtgaagaagtatgcacatgtgaatggccatgaggctggaggagggggagaatagttagggagataaagagcagtcccagagaagggagaaatgtcacttcccttgcctaggtctaccatgaaggtaagagataggttgaggagatgtggtgagaaatggataattctaaatttcaatctggagcaaagaattgttccacagttactaatatggactgggaggaggggaaaaaagacagagaaagctctgtgccactgccagggaaaattcaagtggcagaggacattaaagtaaagatggctgaaaagtgaagacctgcaagggggaggaagaaaggaggagagacactgctgggtactgaaagctctttgttagataacatattcaaggctgaggagccaagtgaagtttgggaaaatcagaatatgaaagaaagtccccgaggaaggtctgaggactgaagtagaccatatttgcacagtgaagtaaaaagaacattgattttggactcagacacacctgcctttcccgatccattgcttagtctctttttaagctttgggtatgttaatttggttttctaagtgtgtttctttaagattataaaatgaggataaagtcacctacctggaaagtttgtgaggatgaagttagatactgcacacaagtgctagcagggtctggcacccagtgaacattagaatctgatgtctccctttcattcctgtcctatgcctccctgcttcgagttaccattgtctttgctcctggtttcccgtaccagcagctggatgtcatgccggtgagtttcaccattctttcattctctcccctccctcttctccaaaccacagtgcatttgctgagagcacctggacgccagtgaatcaaggtcaaaactatccccctgagacactctcaggggtctttccgaaaaaaaaaaaggttttgatgtcttactagtctcattctaaaaaggatgattatcctgggagatggaggaaccctgtcctctttctccaagttgcatcatcattttctggttctccctgggccatgccctcttcagctgccagttttgagacgctgcagtgtgagggacctgtctgcactgaggagagcagctgccacacggaggatgacttgactgatgcaagggaagctggcttccaggtcaaggcctacactttcagtgaacccttccacctgattgtgtcctatggtgaggtcctgggaaggcctgagcagtgccccaaaccccttctttcagcctcagagcccacccaggaaagtgtccctaggaaattggctatgggatgaggtacttccttcccagtcttcagcccacagcaaccagggtgctctaagtcctaggccctagggaagttgtcccatactcccaaccaggggtgagagtttacctggaccctcagagaaagtttaggggagtaggcatgcttgggggtggcccccaagggaggccctgggtgacactcagctctttctctggaccatagactggctgatcctccaaggtccagccaagccagtttttgaaggggacctgctggttctgcgctgccaggcctggcaagactggccactgactcaggtgaccttctaccgagatggctcagctctgggtccccccgggcctaacagggaattctccatcaccgtggtacaaaaggcagacagcgggcactaccactgcagtggcatcttccagagccctggtcctgggatcccagaaacagcatctgttgtggctatcacagtccaaggtgagagctagaagcagcattgtcatggcaggggagggtaaggagagacagggagcccaaattgtctttctttagcctggaggtagcaagatcatcaacagactatggagcaggttgctggcaaatgcccaagttgggcttcgaaagggacgagacctcagccttttgaagtcatccagccccactcagagtccagcatagttcctaccacccagatctatgcttcctagtgctcactgattgggtgtctggacaactatcagatttgcccatctgtggatctttcctagtcctgtctacttacagaaagaacttgacagattcaaatggaatctaagagagcccattcctgctggaaacaggggaaaggaagtatgactccccaagtctcttcacctgcatgtgtctacctgtatataagatggctgagctcttctttcctgcctatctttttcccagaactgtttccagcgccaattctcagagctgtaccctcagctgaaccccaagcaggaagccccatgaccctgagttgtcagacaaagttgcccctgcagaggtcagctgcccgcctcctcttctccttctacaaggatggaaggatagtgcaaagcagggggctctcctcagaattccagatccccacagcttcagaagatcactccgggtcatactggtgtgaggcagccactgaggacaaccaagtttggaaacagagcccccagctagagatcagagtgcagggtgagttcgcatcagagtgcaggttgtctgtttggcatgcgtgtgagtgaaaaggagggataggataaattgacctgtgagctggggttcagtgtgagcaggttaagaagggacacagagggggcaggaacaatgggccagaatccctgatgatgagagacagcacaaatagagaacttctccctcagactgtggtgcacacctcaccagaccaagagctgagccagctccacacctgctgccccacaagccttagcatcccccccaacatgctctctgggcatttataggaatttaatatctggaatgaagatgggatagtctgaagtctatgttcaattctgggagccactgttaagaggctgcacttgacctgaaacactcccagaagaggtgtccagggtgataagggggcttaaagtcatgtcatatgaaaaataatggaaggggctggagatgctatcctgaagaggaggtgactcagaggccagcagaggtgtcctcaaaaagctgaaggctggcattagcacaaggaattggactaatgtcttatataataaagaggctgacctagaaccagttaccacattcatgcttcagggaattagattcagccttgatagagaaagaactggctaatagttatagctgtccagtggtgaagcctcactgctgaagaatttcaaacagaagtggccaagcttcagattaaaatttggaccaggagggacactagagtcctcaagtccctgctgccattgggccccacagccactttcagagaacaagaaagattggccagggatgggagggaagggccagagtcagacttcactcttgtatgtgcctcctgccccataattcaggtgcttccagctctgctgcacctcccacattgaatccagctcctcagaaatcagctgctccaggaactgctcctgaggaggcccctgggcctctgcctccgccgccaaccccatcttctgaggatccaggcttttcttctcctctggggatgccagatcctcatctgtatcaccagatgggccttcttctcaaacacatgcaggatgtgagagtcctcctcggtcacctgctcatggagttgagggaattatctggccaccggaagcctgggaccacaaaggctactgctgaatagaagtaaacagttcatccatgatctcacttaaccaccccaataaatctgattctttattttctcttcctgtcctgcacatatgcataagtacttttacaagttgtcccagtgttttgttagaataatgtagttaggtgagtgtaaataaatttatataaagtgagaattagagtttagctataattgtgtattctctcttaacacaacagaattctgctgtctagatcaggaatttctatctgttatatcgaccagaatgttgtgatttaaagagaactaatggaagtggattgaatacagcagtctcaactgggggcaattttgccccccagaggacattgggcaatgtttggagacattttggtcattatacttggggggttgggggatggtgggatgtgtgtgctactggcatccagtaaatagaagccaggggtgccgctaaacatcctataatgcacagggcagtaccccacaacgaaaaataatctggcccaaaatgtcagttgtactgagtttgagaaaccccagcctaatgaaaccctaggtgttgggctctggaatgggactttgtcccttctaattattatctctttccagcctcattcagctattcttactgacataccagtctttagctggtgctatggtctgttctttagttctagtttgtatcccctcaaaagccattatgttgaaatcctaatccccaaggtgatggcattaagaagtgggcctttgggaagtgattagatcaggagtgcagagccctcatgattaggattagtgcccttatttaaaaaggccccagagagctaactcacccttccaccatatgaggacgtggcaagaagatgacatgtatgagaaccaaaaaacagctgtcgccaaacaccgactctgtcgttgccttgatcttgaacttccagcctccagaactatgagaaataaaattctgttgtttgtaagctattcagtttgtgtattttgttatagtagcccaaatggactaggcagttggcctctgccacatgactgagtttatgatatgttaaaaatactcataaaacagtgtctttgtctacagagggcttacactgtgggatagaagggaatagtaccccatcctataacacaattaaagcagggtatataaaaatttcccacaggatcctactgggctcagaaataagtgaccgagtataatgttgccagagttgcagatatttgtttttaattcatcggtctctgaaatctttctctttaataacacataatgactccgttttagtctcatattaatacttttttctatgcttggacttctattgtacattctcagccaatgagagctggcctggcaggctctataataaccttaactcaatcagttagcacatcattttatcatgacctcagccagtggctgttctaccatgttattctgaattacatggtgtgattttctccactgtggcctttctttgtgccatttattccgtgcagttttgacccaaaatgatttacaagagacatgcacatgatcattctagacataccacaaagaaacaaagacatagaatcatgccgatggtaaaatgagagttttatggtagttcttgccaccttcgagggaaaaaaaaaaaagatcaggaggcatctgggaattggtagaagtctgtaaacaacactacagcctgagaggactgatttacaattctgtgaatgggagttgcaagaatgaccagaactgtcatgactttgatggacttgaaaaaatggaagctcagttgccaatgtaccatggtggatgtgtctccaaagatactatgttataaccactctacatggagttgatttcagctaatgctcgcatttgcatgaatgcatcctgcaagctcctgctaaatggggaattcatttacagatagtagaagctatcagagatctgggaaagaaaagatggatgcagctggctgagataaatgtaatctctgtacacctcatccatgtgtatctgtgcacctctatcaccacactgcattttaattttttattactcatttttattcaccagagggtgaggtctttgagaatactcctgagctctttgttccatgttgtgtcattgatgtctagtataatgaggcatatgtaagttctcagtaaattttgtttagttgaatcgagttgggccagcaaaataagggaaaacatcttgaagaggatgggaatgaagctggaccttaaaggatgaatgtcatgtctggcatcagctaaatctccagactctatccaggggacccagcctcagtcaaggacttagaaacctcagggagaggatctatcaacagggatgaggaaggcaagaacagagctaaaagaatgagagagagagatagggagagcaagcatttacctgtctctttctgtctagcctggggaggttggagagggagtagggaagaggaatcgttacaatggatctggtttatggcttgtgccatttaggattctgtaattgacagaggtcccaatgcagctatgctcaacattgtctctgaaataaacattagatagcaagcacatgaaaggaaaactgttctccgctcacaatacctctgacatgaaacatatggattcccataccaagtttttatctgcttctcagtggaaaccaactagatgttctacaatttatcgattctggctccaactacccagagtcagcacagaccccataggttaaggggtcagtcccacatgactgctctcacttcaaaagccaattgcaaatcccaggcttctggtacttgacaccgaccagctataagtcagaggttctcacaactccttgggttcaataatttgctagaatggctcacaaaacttgggaaaacagtttacttaacagccaatgacgatatacatagggcaaggtatgtgggaagaggtgcagagtttgcacgctctctgggtgtgccaccctccagcttctccgtgtgttcactgatctggaagcccttagaactccaccatttagggtttttaatgaaggcttcattacacaggcatgattgattaaatcattggcaattggtgattcactcaaactccagcccttttctcctccaggaggtcaaggtgagttttccacaccaagcaattctctaattctcagcagaaaccagttagatgttgtgtaatttaccaattcttactctaactacccagagttagcacagacccctgaaagttccaaccctctaattgcagagttaagagtcaccttattagcataaactcaggcatgattgaaggggctaattatacataacaagaaatactcatctcatccctatcactcaggaaatccccaggattttggtagctctctgccaaagagctacccaaaggggcagagaaaagtacatatttcttattgtgttacacacgtccattatcttgtaagttgaacagtgcatctgcatactctgtaacccagaaccccatgcctaggtggatgcgcccaagagaaaacttagcatatgcacgccagaagacaggtgtgataacgtttacagtaacaaagcttgtaaaagcaaaatttggtactgaaatgcctttcttttattgaaaagaagtcagtgcagatgtccaccaacaggaaaatgagtaaattaccatgttaatttgtttcaaaccatattaaacaccaaactctatataaataggatgttgtactaccagctatgcacttggaagtggggatgatgatgaacaagacaggaactcagggaatagatcgctcactggggactggagtgttcaggtgcatctcatgaagaagataatacatgggtggggccttgaaaaacatgacagatctacagaacaggagaagagaggaaaggacgttccagagtgggatgatgtaagcaagggcataaaggggaaaactggcatgcagatgtcagggaaaaagaaggcaaatcctttgaaacagagttcagcggaaggaaataataatggagaagtaaatagactacagaggctcttaaatgtgctatagaggctctttaaatgtccataagaaaattgatcgaattctgtaggtaaattttgagtaaaggaggaactcgtgaaaagtgatgtttaggatgattattctggcactctggtataaggtgaatggggcgactagaagagaggttgagggaggtggatttgaaggctgttgttctcatccagccttctgagacaagggccttggctagggacaggaggaatagagagtaatgatctgagaggtgttaacaggtctgggtgatcagatatggagtagcattgcacctcccaaacacaaagctctctgtacccagcccagtagcccaaggtagaaaaacttggttcagttacaacttagaagagactagggaagggataaaatgacctgctagaatcataggaggaagtttaaggagggtgtgttgggataggcctcaccctagtcctgtcttcttaaaagttttcttccctcttggtatcaaccttctcccttcccactggacaagaggagatgtggagaaatacggagagttacagcacagccttcctgccagagttccttcagacaggcactgttagttttcattaactatgtgtgaatttctcataaagctaaagacattcaatgtaaagaaatactctgctctctattctgaaattgtcctttgcactcctttggtatcgaaatgccttccttttgctgaaaagtttacattaaagaatataattttatgccgggcacggtggctcacgcctgtaatcccaacactttgggaggctgaggcgggcggatcacctgaggtctggagttcgagactagcctgaccaacatggagaaaccctgtttctactaaaaatacaaaactagctaggcatggtggcgcatgcctgtaatcccagctactcgggaggctgaggcaggagaattgcttgaatccaggaggcagaggttgtggtgagctgagattgcaccattgcactccagcctgggcaagaagagtgaaactccgtctaaaaaaaaaaaaaaaagaatagcaatagcaattttaaaaaatatattattatcagccctatcctgggttacagaaaataaaataagaataattttaaatgttcttatttaggaaaagaaaaatttgtttgataaaattacaaaggtaagaaacactgaatattgatgacaagagggaacgggagccacgtgaattgctggtgggtgtataagcttctgcagccacttttgagagtaatatcacggtattcaatctcttcctttgtttatgccacaaatacttacacagcacgtgctatgtgctgtcactgctgtaggtgatacatcagcaaaaaagaaaaaattcctgcctcaatggagcttacattctaatgggggaacctaccacaaacaaacaaatacaattccgggtggtgacaagtacattgaagagaaataaagcaaaatatggagccagcaaatgacagtgaggagatactattttagatagcacggttagcgaccatctctctgaggaagtaatatttgagtgaagtgaggaagtgaaacttacaaaaatctgggaggagaataagaatctttcaggcagaaagaacagcaagtgaggccctggagcaagactaagcatggaatgttccagcaactgttctaaacacaatgtggctagatcagagtgagtgagggggagagttgtaggaaatgaggccaagggtcagagaaaggcccgatttgtagggccctgtagaccatgggaaggtgtttggaacttattctgagggtacctatggggaattttgagagaaagtaacacaatatggttaacattttaaaagtatctctctagcgactcagtgaataaattactgtacaaaaagatcaatgtagcaggtagagtcatcaggacttgctgatgaattagatttgagttttggaatgagtgtgcatgtaactcatgaacataattctgcagtcttgctctcaggtgtgtatcccataaaggcgcttcagggctctgtagggaagcatcatgtccttaccagtactaacttacatgaaacttcctatgtgccaacccctgttctaagccctttacatatgttaattcatccagccctcacaatatgtaccaagaagtccattgtggaattgtctgtggtagctgagggtgggcagcaactaggatgttaggggaatggacaagtgcagtgtagcagaagcatagaatattagggcagtcatggctgggcgcagtggctcatgcctgtaatcccagcactttgggaggctgaggtgggtggatcacctgaggtcaggagtccaagaccagcctggccaacatggtgaaaccccatctctgctaaaaacacaaaattagccaggcgtggtgatgcacgcctgtaatcccagctactcaggaggctgaggcaggagaactgcttgaacccaggaggtggaggttgcagtgagctgatatcatgccattgcatgccagactgggtaataagagcaaaactgcgtctcaaaaaaaaagaatattagggcagtcaaaagcaataaacatgatgcatgtagagcaatctgaacaaatttgaaacatctgggattaatttttaaaagtagaagtgaatataatatctagaacacaatgccacttatgtaaattaacaacactaaatatttctcaaagctaaaaactgcatgttatacctaatgtaaatgacgagttaatgggtgcagcacaccaacatggcacatgtatacatatgtaacaaacctgcacgttgtgcacatgtaccctagaacttaaagcacaaaaaaaaatagcatgtatatgggaacacacagtaaacattttacagtgggtgcttatgtggaggggaggaggacaataatgtgggtgaaagtcaacaaggtaagacaataagagggggaacttgcaaagaccaataatgacagccggccatgagcagcatcttgaatccctgacaatcagagagataagagaacagattttggagacagacttctattcaaatcccagtttcatcatctcagtttcctcatatgcaaaattgggatattaataattcttcctcaaagggccttacaagaattaagtgcagtaatatctgtgaagcacttagcatagtgcctgccacatgccgagacactaaagtgagctgtcatcagcaacaacagcattagttcattactgtaattatcactgagaacactttatcaccagaatgcttatcaaatggtgacatatattgtccagatgttatgttgtgataggcctcaaataattgctcaagttacaaatgataatttctaaatttttctgcattgtaaaggagtgaagaattagaaattctggggaaaagtcctagatggagtaaaaagactcactttgggaaaaacttagaggagagcctagaataaataaatatttcgtgggaaatttttcaagtcaaattctgagcactgtataatatgaacagtatggatggttccagaggtttctagggaagactatacagttcacaaagttttggtgtactaaggtttcttctgaatcgagtaaaggggctgagatctgtgctctgggggatgagaagccaaaatagagccagcttgtgttgcctaagaggacagctgacaactgcattgcattcttaccattgaggtggtggcttggtgcagaagtcagacctctgtggcaggctgtggatcatgtgggaagccacacactggccctgagacgaggaattattaggatggaggggaagcacaagagtgctggtcagcccaggcactcctaaagcaggcaggtgatcatccctgttcccagtaattagttcttctctgcctcccctactcttgggcacattgtcaaatatgtccctactttgtttgaaatctacaggactctatctcttttatcaaaacctgcactcaaaacatgatctgaagtgaccagcataatttaaatgaccagtcacattttcctaagaggcatttgcatttttaaaaggggctagtccattaagcaaaatatgaggggactctcagagtggaacttcaggcatcagcaagaggggaagatactatcttactgggagttgacagtacctgataattgatctccttcccatcagatttccaagggatcaaggtgccctggttctaaacaaccacaggtaaggacaggatagagtccaaggagacacactatcaggctggaaaattcattaagtatttacatgaaaattcaggttctcctcattgctcaggtacggtcacatggctcagaaagcacaagaagtagagccccgaggtcagatctgagaggcttctgaggggccgatgcagtgacttctctgctgcaggtcaggagttctggaactggggcgtggctggggaggggttgcagggaagggtgggaggaaggaagaaaagaacaagtgattggaagtgccacaggatgagctcattgggatgggtaggaaagaagagttttctaacttcttaagaatttaagaatttatgagaactcaagatttcaggaagggaggaagaagaaacacattgcatttctatccttgactggggaactagatgatagggatgtgaagggtggttggtgagtcatgccttttcgtctactcatcgtgggaggatgtgagctctgggggcaggcaaccgaacactgacctctctaggtctcatgccaatgtctgtcatcaggagtgagcaggaaaaaggtccttaaggacatgaggccgtgtcttcctcagctgagccttgcagggctggctggaaggtggagaagggatgggatgggagtgggatgtcaatgggagcctgaagatggcggggtcatctgctggagcctggggttctatggggctctcttgtgctgtggagggcacaagttctgcaggccttcctttcagtagtcagggctggcctgagctgtgaggtggctgtagatgcggtagatgagacagtgcctggcacttgggatacctgatattcagcctgtctcccactggttctggtctgctatcttcaggaactaggagtgggtgggagaagcagcaatgtctcctagtactcagtggcatccactggccacattctttctctctgttccccatctcatgccagtgcatctccatccttctgcagctgctgcagtcagatccatcatgtggccactgacagcccttctgctcctgggtgagtccacagtgaggcagcagaagagctttgggtggtggagaatagggtggaccaaggtatggggagaggagggtgggtatccaatcctcagtttccaagtggttcattatctttttttggaggggtgaagaagaaggggctttctcagagcttgggaaaccaggggcagaagaagaaaaacaggttttgggaccattcagcctttcttgtcgtcaagagtctctctcctctcatcgccaatattctccttctccttcctcttccttctttcctgttctgcagttccaagcagtgggcaagctggtgagtcttataaatttctcatcccaattttctacagcttccactccaaccccctaagtgaccttttcaagtagactcctcacttcttggctgcgctgggatagtgtctcttcccactctcgtcaacccctgggactaaatttgcttgaaggcatttagaaatgggtgctggctgatggactggtagtctgtaacccaatgaatgtgatctcctctcctgcagggatgggttagtacatgggctggggcctgcgagctggggtttcctaagatttcccaaactcaggtcgtttctttgggcacctcaccttgattctctttgcatgctgccccctctcaccccactccccaccccagctactctggagaagcccatattgtctctacatccaccttggaccaccatcttcaaaggggagcgggtaactttgaagtgtgatggataccacccactgctcctggagctccagcccatcagcactctctggtatttgggccacctacttctgccctctcacaagaagagcattgaggtgcagacaccaggggtgtatcgatgccagacacggggagcacccgtcagtgaccccatccacctctctgtatccaatggtgagtggactgagcacgaggggagggggagcacgtgtctcctctggcaatactagtcctctggtgggagggaacactgggccaatcccaaggtgcaggaaacaagggccacactggggcctatcttaagtctctggagcaggtagggacctgcacggcactatgcgagagatgcagtaaggcatgcctagcccccaaggtccccttaccctcctgccatagtgtgaggcacagtgtgaacatttctgtttgtttctgagaccagctcagaagagcaaaggctccaaggacctggagtgctggacagagaactttagggggttggggagggagcagtaaaggaaattcaccaaacaggaaaggtgagtttccctggcagtctgagcatagatcaaggatctactctcagttgaacagtgtgatgcttctctgtgcctcagtgtccacatctgtaaagaagggacaataatagtatgtatctcttcggctgctctgaggattaaaagtgaattatgatttgctaaagaaaaaaagcagcaattgaactgagcacttactcaaagttttattgcagacgtgtatatgtgtacacaggagtcagctgagaaactgattctcgagatgcttgaagggttttaaaacaggataagaaaaataacaataatttgttcaataaagtacaggattgctgggcacggtggctcaagcctgtgatcccagcactttgggag

SEQ ID NO: 3381 - DNA, 1670 bp, Homo sapiens
ggagacctaaacacagtcaccatgaagctgggctgtgtcctcatggcctgggccctctacctttcccttggtgtgctctgggtggcccagatgctactggcagctggatgtcatgccgaactgtttccagcgccaattctcagagctgtaccctcagctgaaccccaagcaggaagccccatgaccctgagttgtcagacaaagttgcccctgcagaggtcagctgcccgcctcctcttctccttctacaaggatggaaggatagtgcaaagcagggggctctcctcagaattccagatccccacagcttcagaagatcactccgggtcatactggtgtgaggcagccactgaggacaaccaagtttggaaacagagcccccagctagagatcagagtgcagggtgcttccagctctgctgcacctcccacattgaatccagctcctcagaaatcagctgctccaggaactgctcctgaggaggcccctgggcctctgcctccgccgccaaccccatcttctgaggatccaggcttttcttctcctctggggatgccagatcctcatctgtatcaccagatgggccttcttctcaaacacatgcaggatgtgagagtcctcctcggtcacctgctcatggagttgagggaattatctggccaccggaagcctgggaccacaaaggctactgctgaatagaagtaaacagttcatccatgatctcacttaaccaccccaataaatctgattctttattttctcttcctgtcctgcacatatgcataagtacttttacaagttgtcccagtgttttgttagaataatgtagttaggtgagtgtaaataaatttatataaagtgagaattagagtttagctataattgtgtattctctcttaacacaacagaattctgctgtctagatcaggaatttctatctgttatatcgaccagaatgttgtgatttaaagagaactaatggaagtggattgaatacagcagtctcaactgggggcaattttgccccccagaggacattgggcaatgtttggagacattttggtcattatacttggggggttgggggatggtgggatgtgtgtgctactggcatccagtaaatagaagccaggggtgccgctaaacatcctataatgcacagggcagtaccccacaacgaaaaataatctggcccaaaatgtcagttgtactgagtttgagaaaccccagcctaatgaaaccctaggtgttgggctctggaatgggactttgtcccttctaattattatctctttccagcctcattcagctattcttactgacataccagtctttagctggtgctatggtctgttctttagttctagtttgtatcccctcaaaagccattatgttgaaatcctaatccccaaggtgatggcattaagaagtgggcctttgggaagtgattagatcaggagtgcagagccctcatgattaggattagtgcccttatttaaaaaggccccagagagctaactcacccttccaccatatgaggacgtggcaagaagatgacatgtatgagaaccaaaaaacagctgtcgccaaacaccgactctgtcgttgccttgatcttgaacttccagcctccagaactatgagaaataaaattctgttgtttgtaagct

SEQ ID NO: 3382 - protein, 225 aa, Homo sapiens
MKLGCVLMAWALYLSLGVLWVAQMLLAAGCHAELFPAPILRAVPSAEPQAGSPMTLSCQTKLPLQRSAARLLFSFYKDGRIVQSRGLSSEFQIPTASEDHSGSYWCEAATEDNQVWKQSPQLEIRVQGASSSAAPPTLNPAPQKSAAPGTAPEEAPGPLPPPPTPSSEDPGFSSPLGMPDPHLYHQMGLLLKHMQDVRVLLGHLLMELRELSGHRKPGTTKATAE

SEQ ID NO: 3383 - DNA, 2346 bp, Homo sapiens
aaggccagctggctatcagacaatgacatgctttgacaggcccctgagctctgtgagtaaattcttgaacagctgagagtgctaccattttgtcatagccctaagggtgcagatgatgctgaaagcgtgttggccaaatctgaatgatgaaagccaattacaaactagaaaatgaaaacagaccccagatgcaaggagatgagacagttaaatttacttcctcttttctaatctgagaggtttcatgttgaagaaaatcagtgttggggttgcaggagacctaaacacagtcaccatgaagctgggctgtgtcctcatggcctgggccctctacctttcccttggtgtgctctgggtggcccagatgctactggctgccagttttgagacgctgcagtgtgagggacctgtctgcactgaggagagcagctgccacacggaggatgacttgactgatgcaagggaagctggcttccaggtcaaggcctacactttcagtgaacccttccacctgattgtgtcctatgactggctgatcctccaaggtccagccaagccagtttttgaaggggacctgctggttctgcgctgccaggcctggcaagactggccactgactcaggtgaccttctaccgagatggctcagctctgggtccccccgggcctaacagggaattctccatcaccgtggtacaaaaggcagacagcgggcactaccactgcagtggcatcttccagagccctggtcctgggatcccagaaacagcatctgttgtggctatcacagtccaagaactgtttccagcgccaattctcagagctgtaccctcagctgaaccccaagcaggaagccccatgaccctgagttgtcagacaaagttgcccctgcagaggtcagctgcccgcctcctcttctccttctacaaggatggaaggatagtgcaaagcagggggctctcctcagaattccagatccccacagcttcagaagatcactccgggtcatactggtgtgaggcagccactgaggacaaccaagtttggaaacagagcccccagctagagatcagagtgcagggtgcttccagctctgctgcacctcccacattgaatccagctcctcagaaatcagctgctccaggaactgctcctgaggaggcccctgggcctctgcctccgccgccaaccccatcttctgaggatccaggcttttcttctcctctggggatgccagatcctcatctgtatcaccagatgggccttcttctcaaacacatgcaggatgtgagagtcctcctcggtcacctgctcatggagttgagggaattatctggccaccggaagcctgggaccacaaaggctactgctgaatagaagtaaacagttcatccatgatctcacttaaccaccccaataaatctgattctttattttctcttcctgtcctgcacatatgcataagtacttttacaagttgtcccagtgttttgttagaataatgtagttaggtgagtgtaaataaatttatataaagtgagaattagagtttagctataattgtgtattctctcttaacacaacagaattctgctgtctagatcaggaatttctatctgttatatcgaccagaatgttgtgatttaaagagaactaatggaagtggattgaatacagcagtctcaactgggggcaattttgccccccagaggacattgggcaatgtttggagacattttggtcattatacttggggggttgggggatggtgggatgtgtgtgctactggcatccagtaaatagaagccaggggtgccgctaaacatcctataatgcacagggcagtaccccacaacgaaaaataatctggcccaaaatgtcagttgtactgagtttgagaaaccccagcctaatgaaaccctaggtgttgggctctggaatgggactttgtcccttctaattattatctctttccagcctcattcagctattcttactgacataccagtctttagctggtgctatggtctgttctttagttctagtttgtatcccctcaaaagccattatgttgaaatcctaatccccaaggtgatggcattaagaagtgggcctttgggaagtgattagatcaggagtgcagagccctcatgattaggattagtgcccttatttaaaaaggccccagagagctaactcacccttccaccatatgaggacgtggcaagaagatgacatgtatgagaaccaaaaaacagctgtcgccaaacaccgactctgtcgttgccttgatcttgaacttccagcctccagaactatgagaaataaaattctgttgtttgtaagct

SEQ ID NO: 3384 - protein, 376 aa, Homo sapiens
MLKKISVGVAGDLNTVTMKLGCVLMAWALYLSLGVLWVAQMLLAASFETLQCEGPVCTEESSCHTEDDLTDAREAGFQVKAYTFSEPFHLIVSYDWLILQGPAKPVFEGDLLVLRCQAWQDWPLTQVTFYRDGSALGPPGPNREFSITVVQKADSGHYHCSGIFQSPGPGIPETASVVAITVQELFPAPILRAVPSAEPQAGSPMTLSCQTKLPLQRSAARLLFSFYKDGRIVQSRGLSSEFQIPTASEDHSGSYWCEAATEDNQVWKQSPQLEIRVQGASSSAAPPTLNPAPQKSAAPGTAPEEAPGPLPPPPTPSSEDPGFSSPLGMPDPHLYHQMGLLLKHMQDVRVLLGHLLMELRELSGHRKPGTTKATAE

SEQ ID NO: 3385 - DNA, 2079 bp, Homo sapiens
aaggccagctggctatcagacaatgacatgctttgacaggcccctgagctctgtgagtaaattcttgaacagctgagagtgctaccattttgtcatagccctaagggtgcagatgatgctgaaagcgtgttggccaaatctgaatgatgaaagccaattacaaactagaaaatgaaaacagaccccagatgcaaggagatgagacagttaaatttacttcctcttttctaatctgagaggtttcatgttgaagaaaatcagtgttggggttgcaggagacctaaacacagtcaccatgaagctgggctgtgtcctcatggcctgggccctctacctttcccttggtgtgctctgggtggcccagatgctactggctgccagttttgagacgctgcagtgtgagggacctgtctgcactgaggagagcagctgccacacggaggatgacttgactgatgcaagggaagctggcttccaggtcaaggcctacactttcagtgaacccttccacctgattgtgtcctatgaactgtttccagcgccaattctcagagctgtaccctcagctgaaccccaagcaggaagccccatgaccctgagttgtcagacaaagttgcccctgcagaggtcagctgcccgcctcctcttctccttctacaaggatggaaggatagtgcaaagcagggggctctcctcagaattccagatccccacagcttcagaagatcactccgggtcatactggtgtgaggcagccactgaggacaaccaagtttggaaacagagcccccagctagagatcagagtgcagggtgcttccagctctgctgcacctcccacattgaatccagctcctcagaaatcagctgctccaggaactgctcctgaggaggcccctgggcctctgcctccgccgccaaccccatcttctgaggatccaggcttttcttctcctctggggatgccagatcctcatctgtatcaccagatgggccttcttctcaaacacatgcaggatgtgagagtcctcctcggtcacctgctcatggagttgagggaattatctggccaccggaagcctgggaccacaaaggctactgctgaatagaagtaaacagttcatccatgatctcacttaaccaccccaataaatctgattctttattttctcttcctgtcctgcacatatgcataagtacttttacaagttgtcccagtgttttgttagaataatgtagttaggtgagtgtaaataaatttatataaagtgagaattagagtttagctataattgtgtattctctcttaacacaacagaattctgctgtctagatcaggaatttctatctgttatatcgaccagaatgttgtgatttaaagagaactaatggaagtggattgaatacagcagtctcaactgggggcaattttgccccccagaggacattgggcaatgtttggagacattttggtcattatacttggggggttgggggatggtgggatgtgtgtgctactggcatccagtaaatagaagccaggggtgccgctaaacatcctataatgcacagggcagtaccccacaacgaaaaataatctggcccaaaatgtcagttgtactgagtttgagaaaccccagcctaatgaaaccctaggtgttgggctctggaatgggactttgtcccttctaattattatctctttccagcctcattcagctattcttactgacataccagtctttagctggtgctatggtctgttctttagttctagtttgtatcccctcaaaagccattatgttgaaatcctaatccccaaggtgatggcattaagaagtgggcctttgggaagtgattagatcaggagtgcagagccctcatgattaggattagtgcccttatttaaaaaggccccagagagctaactcacccttccaccatatgaggacgtggcaagaagatgacatgtatgagaaccaaaaaacagctgtcgccaaacaccgactctgtcgttgccttgatcttgaacttccagcctccagaactatgagaaataaaattctgttgtttgtaagct

SEQ ID NO: 3386 - protein, 287 aa, Homo sapiens
MLKKISVGVAGDLNTVTMKLGCVLMAWALYLSLGVLWVAQMLLAASFETLQCEGPVCTEESSCHTEDDLTDAREAGFQVKAYTFSEPFHLIVSYELFPAPILRAVPSAEPQAGSPMTLSCQTKLPLQRSAARLLFSFYKDGRIVQSRGLSSEFQIPTASEDHSGSYWCEAATEDNQVWKQSPQLEIRVQGASSSAAPPTLNPAPQKSAAPGTAPEEAPGPLPPPPTPSSEDPGFSSPLGMPDPHLYHQMGLLLKHMQDVRVLLGHLLMELRELSGHRKPGTTKATAE

SEQ ID NO: 3387 - DNA, 1346 bp, Homo sapiens
atgaagctgggctgtgtcctcatggcctgggccctctacctttcccttggtgtgctctgggtggcccagatgctactgggtgcttccagctctgctgcacctcccacattgaatccagctcctcagaaatcagctgctccaggaactgctcctgaggaggcccctgggcctctgcctccgccgccaaccccatcttctgaggatccaggcttttcttctcctctggggatgccagatcctcatctgtatcaccagatgggccttcttctcaaacacatgcaggatgtgagagtcctcctcggtcacctgctcatggagttgagggaattatctggccaccggaagcctgggaccacaaaggctactgctgaatagaagtaaacagttcatccatgatctcacttaaccaccccaataaatctgattctttattttctcttcctgtcctgcacatatgcataagtacttttacaagttgtcccagtgttttgttagaataatgtagttaggtgagtgtaaataaatttatataaagtgagaattagagtttagctataattgtgtattctctcttaacacaacagaattctgctgtctagatcaggaatttctatctgttatatcgaccagaatgttgtgatttaaagagaactaatggaagtggattgaatacagcagtctcaactgggggcaattttgccccccagaggacattgggcaatgtttggagacattttggtcattatacttggggggttgggggatggtgggatgtgtgtgctactggcatccagtaaatagaagccaggggtgccgctaaacatcctataatgcacagggcagtaccccacaacgaaaaataatctggcccaaaatgtcagttgtactgagtttgagaaaccccagcctaatgaaaccctaggtgttgggctctggaatgggactttgtcccttctaattattatctctttccagcctcattcagctattcttactgacataccagtctttagctggtgctatggtctgttctttagttctagtttgtatcccctcaaaagccattatgttgaaatcctaatccccaaggtgatggcattaagaagtgggcctttgggaagtgattagatcaggagtgcagagccctcatgattaggattagtgcccttatttaaaaaggccccagagagctaactcacccttccaccatatgaggacgtggcaagaagatgacatgtatgagaaccaaaaaacagctgtcgccaaacaccgactctgtcgttgccttgatcttgaacttccagcctccagaactatgagaaataaaattctgttgtttgtaagct

SEQ ID NO: 3388 - protein, 124 aa, Homo sapiens
MKLGCVLMAWALYLSLGVLWVAQMLLGASSSAAPPTLNPAPQKSAAPGTAPEEAPGPLPPPPTPSSEDPGFSSPLGMPDPHLYHQMGLLLKHMQDVRVLLGHLLMELRELSGHRKPGTTKATAE

SEQ ID NO: 3389 - DNA, 1794 bp, Homo sapiens
aaggccagctggctatcagacaatgacatgctttgacaggcccctgagctctgtgagtaaattcttgaacagctgagagtgctaccattttgtcatagccctaagggtgcagatgatgctgaaagcgtgttggccaaatctgaatgatgaaagccaattacaaactagaaaatgaaaacagaccccagatgcaaggagatgagacagttaaatttacttcctcttttctaatctgagaggtttcatgttgaagaaaatcagtgttggggttgcaggagacctaaacacagtcaccatgaagctgggctgtgtcctcatggcctgggccctctacctttcccttggtgtgctctgggtggcccagatgctactggctgccagttttgagacgctgcagtgtgagggacctgtctgcactgaggagagcagctgccacacggaggatgacttgactgatgcaagggaagctggcttccaggtcaaggcctacactttcagtgaacccttccacctgattgtgtcctatggtgcttccagctctgctgcacctcccacattgaatccagctcctcagaaatcagctgctccaggaactgctcctgaggaggcccctgggcctctgcctccgccgccaaccccatcttctgaggatccaggcttttcttctcctctggggatgccagatcctcatctgtatcaccagatgggccttcttctcaaacacatgcaggatgtgagagtcctcctcggtcacctgctcatggagttgagggaattatctggccaccggaagcctgggaccacaaaggctactgctgaatagaagtaaacagttcatccatgatctcacttaaccaccccaataaatctgattctttattttctcttcctgtcctgcacatatgcataagtacttttacaagttgtcccagtgttttgttagaataatgtagttaggtgagtgtaaataaatttatataaagtgagaattagagtttagctataattgtgtattctctcttaacacaacagaattctgctgtctagatcaggaatttctatctgttatatcgaccagaatgttgtgatttaaagagaactaatggaagtggattgaatacagcagtctcaactgggggcaattttgccccccagaggacattgggcaatgtttggagacattttggtcattatacttggggggttgggggatggtgggatgtgtgtgctactggcatccagtaaatagaagccaggggtgccgctaaacatcctataatgcacagggcagtaccccacaacgaaaaataatctggcccaaaatgtcagttgtactgagtttgagaaaccccagcctaatgaaaccctaggtgttgggctctggaatgggactttgtcccttctaattattatctctttccagcctcattcagctattcttactgacataccagtctttagctggtgctatggtctgttctttagttctagtttgtatcccctcaaaagccattatgttgaaatcctaatccccaaggtgatggcattaagaagtgggcctttgggaagtgattagatcaggagtgcagagccctcatgattaggattagtgcccttatttaaaaaggccccagagagctaactcacccttccaccatatgaggacgtggcaagaagatgacatgtatgagaaccaaaaaacagctgtcgccaaacaccgactctgtcgttgccttgatcttgaacttccagcctccagaactatgagaaataaaattctgttgtttgtaagct

SEQ ID NO: 3390 - protein, 192 aa, Homo sapiens
MLKKISVGVAGDLNTVTMKLGCVLMAWALYLSLGVLWVAQMLLAASFETLQCEGPVCTEESSCHTEDDLTDAREAGFQVKAYTFSEPFHLIVSYGASSSAAPPTLNPAPQKSAAPGTAPEEAPGPLPPPPTPSSEDPGFSSPLGMPDPHLYHQMGLLLKHMQDVRVLLGHLLMELRELSGHRKPGTTKATAE

SEQ ID NO: 3391 - DNA, 66839 bp, Mus musculus
  misc_feature (1)...(66839): n = A, C, G, or T/U
ttatgtggtcaaatttggagaaggtaccatgaggtgctgagaagaaggtatatcgttttgttttaggataaaatgttctgtagatatctgttagatccatttgtttcataacttctgttagtttcactgtgtccctgtttagtttctgtttccatgatctgtccattggtgaaagtggtatgttgaagtcttccactattattgtgtgaggtgcaatgtgtgctttgagctttactaaagtgtctttaatgaatgtggctgcccttgtatttggagcatagatattcagaattgagagttcctcttggaagattttacctttgatgagtatgaagtgcccctccttgtcttttttgatgactgggttggaagtcgattttattagatattcaaatggctactctagcttgtttcttcagaccatttgcttgggaaattgttttccagcctttcactctgaggtagtgccagtctttttccctgagatgggtttcctgtaagcagcaaaatgttgggtcctgtttgtgtagccagtctgttagtctatgtctttttattggggagttgagtccattgatattaagagatattaaggaaaggtaattgttgcttcctattatttttgttgttaaagttggtattctgttcttgtggctgtcttattttaggtgtgttgagggattaccttcttgctttttctaggatgtggtttccgtccttatattgttttctgtttgtttgtttgtttgttttttgtttgtttgtttgtttgtttctgttattatcctttgaagggctggattcatggaaaggtaatgtgtgaatttggttctgtcgtggaatacttttgtttctccatctaaggtaattgaaagtttggctgggtatagtatcctgggttggcatttgtgctctcttagtgtctgtataacatctgttcaagctcttcttgctttcatagtctctggtgaaaaatctggtgtaattctgataggcttgcctttatatacttgacccttttcccttactgcttttaatattctctctttatttagtgcatttgttgttctgattattatgtgtcgggaggaatttcttttctggtccagtctatttggagttctgtaggcttcttgtatgtttttgggcatctctttctttaggtttgggaagttttcttctataattttgttgaagatatttgctggccctttgagttgaaaatcttcattctcatctactcctattatccataggtttggtcttctcattgtgtcctggatttcctggatgttttgagttagaatctttttgcattttctattttctttgattgttttgccaatgttctctatggaatcttctgcacctgagattctctctttcatcttttgtattctgttgctgatgctcttatctatggttccagatttctttcctagggtttctatctccagtgttgcctcactttgggttttctttattttgtctacttccctttttaggtcttggatggttttattcaattccatcacctgtttggttgtgttttcctgcaattctttaagggatttttgtgcttcctctttaagatcttctacctgtttagcagtgttctcctgtatttctttgagtgagttattaaagtccttcttgatgtcctctaccatgagatatcatgagatatgcttttagatccaggtctagcttttcaggtgtgttggggtgccctggactgggcgaggtgggagtgctgggttctggtgatggtggtggtcttggtttctttagtaagattcttacatttacctttcgccatcgggtaatctctggagttggttgatttagttgtctctggttagagtttgttcctcaggtgattctgttagcctctatcagcagacctgggagactagatctctcctctgagtttcagtggtcagagcactctctgcaggcaagctctcctcttacatggaaggtgcacagatatctggtgttaggacctccctcctggccgaagatgaaggcccaaaacaggacctgtccccgaagctgagttgctttgttctgtcccagaagctgttagtttctgtattccacactctcacctgtgcagaattctctcggcggagtcctggaaccaagatatctgccgccaatgctcaggcaaagcactcctgggccgggtggacacctatcctctggccgggaaagtggctggatgtctggggcccgaaaagggggctagagcttagaagctctgtggctctcgcctgtcccagaagctgttagcttctgtattccacactctcacctgtgcagaataccctgagacattttcttaactgggctaactgcagtaggaagaccaaccctgaatgtggacaaggccgtttcctggaccagagtctggcctgagtgaaaaccagggtaggcttggcacacatgcatctactgctgctctcctcttcaactgcagacataacgggaccagaaatgggcatgtgctgtagagtccccacaatgcattagctgacgtgaaattcattggcatagattcatttgaggagtgcgtcccctggctggcctggaacttgctgtatagtccagagctgtcctcaggttcactgccttctctgcctccaaagagcaggtgggatgtgattctagaacttttaaacacatgtaccttatgcccctgttattgacctacaaacagttttagacatcctgaatgtgtctaccttcaagagaaaaccaaaaaaagtaagaaaaaaagaaaagaaaaagagaatctcaggctggggacataattcacctagcaggtacaaggttctacccaccacccatgccaccagaaaagaataagaacaacaatgaaatagagataaagaaataaagacaaaatcccaaagaactttgcagggttgagcagcaaactaacacagaggacctgacaaagatctgtgccatgttggaaggcagccaggattcctttccacctggggagaggatctgtttgcaaaactggatttgaggttttgtcgtccacaatagggagaacggtacagcaaatgaaaatctaaggactaaataaacatggtggggttggggcagagagagagggggacatagagagagacagagagagtgagagagagagagagagagagagagagagagagagagagagagaataaggtagctgaacaaagagcaagaacgggaaagcttcccgactaccctcttcctgcctcctgtgcccaccgttcttaggcatcagcatgccgggtccaaagcccagtggcaccaacgtgggttcctctggccactctcccagcaaagcggtggccacaagggctgcaggatccactgtctggcagagaaaaaatgccagctgtgggacccggagcgcaggccgcaccacctctgcagggactggggggatgtggcgattctacacggaagattcctcagggctcaaagtgggccttgtcccagtgctggtgatgagtcttctgttcatcgcttctgtatttatgctgaacatttggggcaagtacacgtgatcttagattgggctacatccatctgtcatctgaagaagaagaaggaaaaaacccaacatatcttggaccaaaagtgtagtgattttctgttcacgtatattattctacagagaataagaattgactttgagaaatcagttttttctatggctaataaactttggaattgctttaaaaaataaaaaaaattaaaaatgggaaagcttgagagggttctagaatgaaagaggggaaggggaggggaagagagagagcacaagagcttgaaagagagagccagagaacaagcaagagtcagagggcaagagagcataccaaactgagagcacaggagtgagaaaatgagagagagtgagagaggagagagctagaaagagtttaggtgcagagagcattgtccatgggctgtaaaatgccaggcaattaagaggaccacacaagatttgtcttttaaatgtgcttgctttatccacacaaacactccacattctatcctgctgtttgggtagaaatgctgctgcagtttcagtctttcctggtgagcagaagcttgaaggaggatggccctgaggtcctttgtaaaagtagcttttattctgctgatatagttgttgtctccaaggcttgctgcctctgcctgctaacctcggcctactcctggaacttctggacttggtacattctaatccaggcctagagtgttttcagcctctaagacttactgctgaataagctcaccctttcctgttctttctgagctctgactggctgctcaactcagctgttctggctcaaactcctctccaagctgagtgattcaatctggcttctctctcagcctctgactttttgctcttcttggcctcaaactaaaggttgaaacacaaagcagggcggggggagctgcagagtgaaccattgtgttttcacaggaaggattaaacaagggagtgccccttggagactgggccatgtccaggcacctagcttcagggtccttaatttattctcctagacatttggtgcagaactcagagtgataaagggacaaaggagcaggtcagcagcatggaggtaaactggtaccttaattctacttcagtgaactctccccctattcatctgttgggtcagcacggccacccatttgcaggctcaggtagaatgcacacagagtccacaccaggactgggaagaagttcatgtcagcaggttcttggattccactaaggttaggggagtctctggtctggagcaaagcagggatgtgtccagttcttgtcagttgagtggcactgctgagacaggattgaggggaactgcaggagcaaggctgcctctaacaattggtatctccaacttcaaccctcttcagattgagaggatcttgaacaaacctggcttaaaatataagcctgcagttaaccagatcaagtgccactcatacctaactcaggagaagtcgattgagtacggccattgcaaaggcatcatggtgactacatacagtcccccttggttctcctgataggccctgggccaagcctgaagacccttctctcctggaggatccaggatcaaggcaattgcagccaagtgcaataaaactgcagcccagatagtgatcctgttccccattcagaagaacttggtagtgatccccaattctgtgactccagagcatattgctgagaactttaaggtctttggcattgagctgagcagcaaggatatgaccactctactcagctacaacaggaactggaggatgtgtgccttgatgagctgtgcaaaacccaaggattacccctccatgcagaagtctaaagctgcggcagacagatccctgctcctccccaagtgacaataattcctcttacaaatctcaggtgtcatctttctctaattatttgacaactaataaaaacataattaattctaaatgttcaatcaagatcacttgggagctacacctctagattactaggtttccaacggtaaagaaaaaaacacaacagatattttctgtttgagaagttattcctggggagaaatattttaaaaactgtagttctgggaaattgggcagaagtgaaagtagttactgtaagtgaggagcatactgcctcctagtggtgacttctcctgctctgctttagtcatttctctgagaaggttcctcctttaaacaagcttgccagctatttgagactgtcttgggaagtatggcacagtttccctgatttctttcccagatcatttgccattgtgtatgggaaggctactgatctttgtgaattaatgttgagtcctgtcactttgttgaagttgccagtcctgtcttcacatcatgcacttctatcccctgtatgtattattatttttttttatacaggtctacctataaggatattacaccgacccttataaatccgctgtaagttgaaagtattgacagtttacaaatgcatttaacatacctaagcactagacaactgaaggcaataacttgcagcacaatgaaatgtgtcactcaattgtctttctgatcacgtgactgactgggagccacaacttattgcagccgctcaacacagcaaatatcaaaattcacagttcagagtgcagcctggtgtggtggtacaagcttgtaggagctacagagtaaggattaaggcgtaaggaccatgagtttgagaacaacctggactacagagcaactcactggttttagtccatgaagatcctgctcaaacatacaaacaagcaagcaagcaacaacaacaaaaacacacttttaaaaagtgaaagtacagtttctaaaaagtatacatggccataacatcatcttgaaattgagaaatggctgagtcaaccatcacaagccagggactctctgtgtgatgggtttgcttctgtcctaaggacacatttttcaccaagtatgaaagccagtaaaatggttcttattcctaaaaatttttaccgtgggagatggtatatacaatcatgaaatttatagaaaatcacttacctttaaggccataaagaaagaatctgcctctatactgctggggttcaaggtgtgtacaacccttccccgcatatgagaatatttaataataatttaataataaatatttaatagtatattaaatagagtatttaatagtaatttaataaaaaaggggaaaaatgaggaagatgtaccataggtcaggtatgtttctgacatccatctatttcagcttactgtgagttaataagaatggatgtaagttcattatagtttgacaaatgtttgtatataaacatacctggattggtctggaagatggatcagtgattaagaccactggctgctcttcctgaggacctggatttaattcccagtaccaatatggtggctcacagctttctctaacttaagttctaggggatttgacaccttcttctgggttcagtgggtgcacgcgcgcacacacacagtgtgcacttacattcctgtggacaaacatccaaatacataaaaataaaaagagagaatgaacctttaaacaaagggaatgaggatatgctgtaaagacagggctgtcaagaggtggcaaacaattttcagagcagttcactgagggaggaagctttcctgagaaagatctgaagaaagtgctggttgggataaaggtttcttcaggaagactctagtgaaagctgtaacagaaaggatatcttctattacgagctaaatcagttctaaggactcaagatttccaaattggtcctaaaaacagggcagcctaacctctgatctctggcccactgtagtaggatgtctcgctgtggggagagctgtttgttttacaattagtgacaggagataagagagatgggggctgtggttttattctttgggtaggaaccccagggttcaaacttaaaccatcaaatgacctcataaagattcacctcagagatcatatgtctgcagtgagagctttggaaacttcaggaatttagcatagagactctggttaaactctttctgatatcccctaactttgtaaatattgttaaaggaaaatccacagactataacacactcattagagatagttactacttcagggaaatattttttataggacttctttaaaatttttatttaagaaggatttatttatgtattttataaatgtgagtgccctgtcagcatgtacaactgcaggccagaagaaggaatcagatctcattatagatggtgtgagccatcacgtggttgctgggacttgaactcaggggcatctggaagaacagccagtgttcttaacctctgaggcatctctccagccccacaagaacttctttaattatatcagagttcaaggggtttaaagaggatgcaaagaaacagctcagtgaatcaaggagaaagagtctaagtgcccgagtgatgcctgagagaacacacaccaggctgaaggaaatgatgaagacaggcccggtcttgaggatggaactccatgaggagacagaaacactgaggaggactcaagctgagatggagagggagagtccagtaactcagctagaacccacaggaaaccttgacgcatggaaaatctcgactcagctgggcgtggtggcacaggcctttaatcccagcactcaggatgcagaggcaggcggatttctgagttcgaggccagtctggtctacaaagtgagttccaggacagccagggctatacagagaaaccctgtctcgaaaagcaaaaacaaaaacaaaaaggaaagaaaaaagaaaatcagaactcaaagttaaagcagagatctagagcaaataatcaaggaatatggagaagaaaataacacgggaaaggaacacccaggaaatgtgggacaacatagacaaaatgagcctttcgattacaggcccaggtaagggagaagaagcccaagtcagaggaatagaacagactaacaggatcataggcaaaagcttccctaagactaagagaaggcacaagaagcacacagaacaccaaatagacaagaccagaaaagacatgttccagcatgtgtacacacctacatcacacacgtacaccccacagatccttagtacctcaccgtcacaaccggcaaacttccatttagtagttattcccagaaagcgagaggattcacttaatgatactgtcttcctaccaaaccagaaaatgtaggcttgtaattgagtctcaaagctctcagccatggctggagagatggctccatggtatagagcacttgctgttctttcctgaggatctgggacatgggcggtcacagccattcgtaactctagttcccggggatctagagatctctctggcctccgcaggcaccgggtgtggaagtcatacacagacttacaagagagattttagtcaggtttgaggtacaaccatctccttcatttcaggacaggtggccacatctagaagctaaaactgtagaaccgggcggggtagggtggggctgggagtcgggcgccgacttaatgtcccttcctaatccatgcttgaatgttaaaaacgtcttgagtactgaaattttacttggatgacttcaacattggcttaaggttcgtccaatgctatacacgcacacgaacacgcacacgcacacgcacacgcacacgcacacacacacacagagcagtctgacccaagtaaacagtccatacttaatcactgtgccctcttcttgctccttttgagatagagttcgatgtttaggcctggcacacaaactcccaacctcctgtcccagcctctcgattatagggattacaatcgtaaacactgaattatttcttaattggtctcttcagttataaaaagaagctataaatcaaattatattaaaagcatgggcacttaacaaaacatatcctttgtcgtcctgacccattgtttgtcctgttctgtgataagcatatattcatctcctgtttattttatcccatttgttaaacaaaacaaaacaaaattcaaaaacaaaaaacaaaaaaaattcaaaacacaccacagaaactgttactttcgctttgtcttttcctggatgctggcttctcagagtccaatgtgagcctgaattagggcaaaaagtttgcccaggtttccggatctggctgaacccctaggtgagccctcaccccaagacgccactccaaccacgccccacagagactccccccttcccgcccctgcaccaggactcgcccctgcccctttccccatggcttggccccgcacctgtcccaaagggggccccagccccagggctcccctgattgcatcttccccatgtcgcgccccaccctcccttccgccccactgcctgctacttcctctgctctcttcgggttccctgctcctgaccacgaccacagaggctccaagagctctgcagagcagaagccagagcctcttgcaccttccaaagacccgagctgcaaatcttcctgtgcaagtagcaacctgagcccctgcattatctcacagtggtgagtgtgggtgagcaggatgcagaagagtgcaagagagggctgggaaacccactgcagcttcatttgcaactgtgaaatgcaaagcaacttggttcatagagggtctctgtttgggtgggttagcagtgtacaacttttgattgccaaatgtatgaaggcaaacacagttggtgttgggcaggtaaaagttttactggtagcagagataccagaagtgcatgagatatttgttaacactgttactttaagggagctgggcagtttataattttttctttatcccatgatatgaaatttgtcaggcaatctctaattcgatacacagatatttaccaacttcttgcgactcttcctcagatagttcagaaaaggtttcaacagacagaaaagttaaagaccagaattattagactgcaaaccttttagtggattgtgtatctataatctgttttattttcttccctaatactagaagtgtggtcactccttagggtgttaacatgtgcctcgccaacttagtgtgttctcttgcatcaatgtgcactaagacacaaacacatgcagaacgtatttttgcatgtaccgtggttgagcatccgtgtagcatttgagaagagaagaaatatcataagcagaaataaaatgcaaactagaatggagggcttccagaagccatggacatggagagatcagaaggggcccagtgcactgagggaccctccaaggtgaaagttgcatttttagatgattgatttgtttttgtttttgttttgtttgtttgttacatgtatgcaggtgctctgcttgcatgtctggagcccacagaggcctgagagggccctggagcctctggatttggcgttgtaggtgttgtaagtccctccctgcattatgcaggtgctcagaagaagaagagtatgtgctcttaattgccgagccatatctctggccccttaagttgctttcctgtgaccataacaagaaggggttgctcagccccacagctcaagaacaataagggaagcgcattgcttttcagagaggcttttgccagtttgcctttgagggaacgttcttgcatgtgttaatttgggatgtagaagagactcaaaggaagactatgctacgaaccatcccatgatgccagcagcagcactcatgctagggtaaactgtggctgtcattttccttaccctgtgtggtacagacaggtcttacctaaagacaaactgagatgtcctatgcagttaggcaagtctcatgttctggaagtatttggtaaatacttaccttgtagtcgcattgcatatactttggggcaccatgtgacattcagtacatgaaagctatgatcagttcagcacaattttcctgtcatcacagacagtttgttgactattttttatttaaatttagttgtagttaaaaactgtttgaagtaggaaggcttagaatgagctgcttaattagaattacttaattactccattgtgtaaatataccacattttctgtatccattcttctgtcccttcagctttttcaatccatcccttaactctttcatagaggtccctgaccttagtccaagggttggctgtaagtatctgcatctgtctcagtcagctctgctggtagagcctctcagaggacagccatgcagaggggtaggggcatgaggtgaacaactctgggaggggagaccaggaggaggtaacatttgggtataaatgaacaaaataattaattaaaaaattatgatgacctcatcttgcatgacctgcaggatatgactgagagaccaaagaagaacttttttattagagtagaatcctgaactacagactgaagacaggaaacttgtgtcccctgccagcaagcacagcacggcatcagtaacagtgtcagggattgatgcccaaccatgcatgggataggtcccgagctgggccagtcacttgactgcctttcctacagtctctgctccatttttgtccctgcagtttagctcagaccacactcattgagacctgggagtctctcaccgcccaggtgtctgggcaattttttttcttttttcctctccaagagcaataattcatcaccttgttattgaagctctggtagtttatatttcagttcatttagtctgctggagacgcttttccctgaattttaaaactttatctgcaaagttccaaatttccatttttagaaactccagctgggcagtggtggtgcacacctttaatcccagcacttgggaggcagaggcaggtggatttctgagtttgagggccagcctggtctacagagtgagttccaggatagccagggcaacacagagaaaccctgtctcgtaaaaccaaaaacaaaaaacaaaaaacaaaaaacaaaaagacaaaacaaaaacaaaaacacctccatatttattgctcagatataaaaacaataatcataacgggcataaggaaagtaatgggtgaaactaatatagaataaaacataaagttagaaactgataaaggtaaaaaaatagtgaagagaaaaggaaaaggagcggaaaagaaaagaacaagagattaaaaacaatataggtacaaaaattttaaatgtataaataaaatagataaattgcaggtctctaatcctgacacttggaagttgagggtagaagatcaaaaatttctggcaagtctgagccatacaaggagaacctgtctcaaagttaaaaacagcaagattaagtaaacacaagacaggggcttttaaaacatttaaatgttttaaaatattaaaatgaatataatatcaaaataacacataacatttttaatatctggagggcaaggaattagaagagacttctctttggctctcagagaatttgccatgtctgtgagcatcaggtcatagtcagtgtgtctccttgttctttgttgccaccttacaggttggtgctgtgcacagtattcaggtgctgtgcacagtactcaggtgctgcacacagtactcaggtgctgtgcacagtactcaggtgctgtaataacagagcatctgctctgctgacttccctcctttgtgtacctctttccttctgcccagaggactctgtggcctgtggtctatgtgaaaacaccagtttgtaggatttatctaaaaaaacagctgtgtctcacagatgctttgggggaagtggagatggcaaacagagcttggtgttctgcaatgaggaagaggagtcctgggacccgagctctctgcctgcctaagattttcagatcctacccagcagctaactcccacacagtgaggaggaagctgtgataactgggtaatccttgcaactaggggtcagagctctcagcccctgtctgccgcacacaacatgcagtgggagccagtttcagaaaccaagagtctgccagccacctgctcagaactctcaggctcagcagtgtgcctgtcaatcactcctacttctgctactgtcactcatggctgccactcaacccgtgtaaccaggacaccatgacttctgctggatgatttggatccccctcacagtcaaactcagaacctagaagctcctggtgcttgcagtctgagaactagagagagtatagaactcgggctctgcccatctcggtgtgtctttgtattatctgggacagtgattaccagagtaagccttgccatgagggactccagtttacaaagcagtggttgcaaatgctaaagcaaaatgactttgtaacatatgtgtgcaaatatctagcacagttaaaaatagatcgttaagtaacttataaatacaaatatataatgcctacgaacacattaagcctggaacacctagatacatggatgtttttaagaccttgtcagagaaaccaagcttgtatgctgcccaaaacaccagagccatgagcactgcaatgccctgtcttgggtcccccccacccccaagccatcgtcaggccgcctgagctgtgcgtgcatcaccacatacacaggcaacaaactctcaagtccatcctcaggatctctgctgaccatgatcagcctcacttgaaatggcccacttgagttcccatatgttcaaacctcataggcctggtgtcagctctgtgctctgcagcagtctacaccttactgacactgtgccttgaaccaactgtatattttggctgccctgttacagaatagctcaatctggatgtgtatctgttcctttgccttccacaagtttacatatatgccagcatgcatgaacatcacacacacacacacacatgagtgggagtggggacacacacatgcacacacacacacacggggggggggggtgggaaggaggtattaatggtggtcattggtagtcatgtatttttcctctgaactcatagtatatcataataatcttttgaagtaaataaaatcttccctttcatctctctttattaattacagatggcatttatcttcagctcaatatgctcattagtttcttaggaatatggtgtcttaggggtctacgtactcagtcatgtctgcttctcatctaggtcctcaggtaatcacagagatatgtatgttcatcaggaaggagtccacccatggaaggaagtcccatttaaaaccatccgtgagtgtgatgatccgtgttacgatcgtgtttgtctggaccttcaacttgctattgattttccttccacaggaagaaagaacctcctgagatggcttctaataatgaccccactgtaatctcaatgatagaaagacatctttgtgaccttcctgaaacaaacaccagtgacctgaagacattgactgaagaggctgtgttgagttttcacaacatcagttaccaagaaacagtacagagtggctttccacttcgtaaaaaggcatatgtgatagaaagactatcaaacatcaggtatgtccatgagctaaagacaacactgtttggaataacattcttttttttttttttttttttttggtttttcgagacagggttcctctgtagccctggctgttctggaactcactttgtagaccaggctggcctcggactcagaaatctgcctgcctctgcctccctagtactggtattaaaggcatgtgccaccacacctggctggaataacattcttaagaaacacagactttttatttataaataagctgatgtgtgtgtatgtttgtgtctatgtatgtatataagtttatctctgtgcatgtgtgtacatgtctgtgcatgtttatgtgtgtgtatgtgtgtggcatgcacacacacacatgtgcacacacacatgcatgtctgtagatgtgtggatgctattacacacatggcacaaggctctcagagtacaaccttgagcattggtcttcaccttttccttgttggagaaagagtctctgatggttcactgctgtgtgtggcaggctaggagcctgcaggcccctggagattctcctggctctgtctcctctccaactgctttagaggtgcctactactgcacccaactttatgttagttctagggggttaacttaggtccttatgtatcaagtgcttccccatcaatccagcctcaccatgttctacctacagataggttcatgaccacagtgactttaatgggttggtgactaaagaacaacaaaatggattaatgacacaaaaaaggtggctctttggaaatacaaataagcttgacaaacccttagacatagtaccaaaaaagaactgataaattttagttcaataaaattagggatgaaaaggtaataccaaagacatactgttaaagtcaagagatgataaaggaatattgaaaatttaaattctagaaatttgaaaatcaaaaaagagttgcgtacatgtctatgcacacagccctcccaaagctgaactgagagtttccagcaggctgactgggtcaatcacaggtggtgagatgggagcagatagaaaagtgccaacagcagacagtcagggcctgatgtatctgctccaagttcattgacagctaaaaaggacaaaagaaatgtggaaacacagtgttccacaaagtaaagagagcagcctgtaagaaatcctaaggagaacaagcataccaagatttccccagcgcagtctgtgttacactctctttctctcaagcccagccttatggtgttcttggacactggacatttctgctcctctaccttcaacttccaccatttcttactaagaagggcatgggcagggcaaagtattgacacattatctgaatgtgaactggtgaatgggaagctaactaagcttctataagaatatatgcctttcagcctgaatattcactactctgacagattcaatcagttttctgagactgatttgtgtttgtgctgtatccatacatcaataaggaatgtccgtgctctgagcgatgtatttcaattctaatctgagtgtattctaatttatgtgccagagaaggaaaccatcattttcgggatgtatattttttgtttcctgttttgattcaggtgttgttcttgagtgttgatctcggcaaagctttcctgacctttggagtgcttctttctactctttggatttctactgaagatgtattgattttggttctattccattttaatagcaacaacagagcttctgataccctatggatcattgatttctcatgtagaggttcacttagtagcaagcagggttatgaagacactgataatcacacattagcaggaagctgttatatacgtgacacaaaaaggctgtgtgtgcagtggagtcttcatgagaactggctgctcacttcaaggaacgtgaaacttaaatgcatcacatttcaaaacagagaaatgatttcaataataaacaaaaggaattttgtgatatctgagactttttttttctgatgagtccccactattaattgatatctttcataaataatagacctctattaacatttaaaatttgttatgcgtttctgcttatattctgtctacaatttcatccaaattcaatgagcattttcagtgtagactctaagataatataacttattcataatagaaaaataaaccagtatgactttgtgtttacagtgggatcatgaaacctggcctcaatgccattatgggacctcaggatgggagcagatctttgtgagtattacagaaagcatacataagcccttcgcatccagttcatgtgctttaaaagcagtcccctttacgggtgttatttaagcattgttattacagctagtctagtcctatgtgctatggatgatgtgcaggagggatgtgttctaatgttccacagtgaacaggaagtttctatgtccacgttatgaataggaaatggtaatgtgattggcatgtggtattaatacatattatttaatgaagtcgggagataatattgaaatagaaagatgaagcagaagttgtctgaaaggaagaaatcatcggtaggcctatttctcaaaatacagcagcacattacctggatcctcaggtttagatagcagggaaaggtatttatgtagaccatgtcttacatttataattatgggctgaatgacagcacatagtgaagagaaaggtacgtgtgtgtgatttttgttaaactgctgacttgttcactacattatgtttctggtttacttactatgcagaattttaattttgagtcactaaaggatgatacagttttcattgaagggagaaaataaactacacaatataattaaccctttgtaggttgttagatgtcttagctgcaaggagagatccgcgtggattatcaggagatattttgataaatggcaaacctcgacctgctaatttcaagtgtacttctggttatgtaccacaagtaagtgttggtgggttgtattttcagtttcctttgcttgtgtgggacagatactcaacttatagacttgtgtctttccagttaagtgtatgatgcactcagaggccccacatttcctatgccaatctttcatagtgactctttacctggagtctgactctgtggcacagcattagctattgcagccgtgacttaagtcaaaaggaccactgttgtccacttttgcctttcctctagctttctacaatccttagaagatgtcttctgtaaataactgcaggcagcaatcaccaaaattcctgtcctcttcttggaaggcaaattgttgcgggcatgggggaagggaagggggaacatttggatcaggctctgtgtttgggattagtgaaattgacagcttgttttaagctgtcaatttagagcattacattgggtgtgttgtttgtgtaggctaggttacatttgttagagtcttagtgataactatgcctaattgaaattccattcgcccttaagaatgatgtggtgttgggcacagtgaccgtgagagacaatttagagttctcagcagctcttcgtctcccagtgactataacaagagatgaaaagagaaggaggattaatgaggtgcttgaacttctgcatctgaataaagaacaaaatatcaaggtaagatgtgaggaaaaatattgaaagactcatagcaagagaaagagagagagagatctgtgtgtggatgacatgcccctccacaagctgtttcctgtagtttgtgtggtcaaaggtggctgctttctctgttaatgactaagtgactgggtacatgatgttaaggtggaaattaagctgtaaagccatcttaataatggttgagcctgggaatggagagtgatccagcggggaaaagtgctcctcacatggccatttcaagtcttcctcacatgacatctctacccttagtgttaaactcatgactcatctgagaatttgatgagttttctttttctgttgaccttcccttcctctagagtggtggttctcaattttctaaatgctgtggccctttaatacagttcctcattcctggttacccacaagcacaaaattattttgttggtaccttataactgtaattttgctactgttgtgaatcctaatgtaaatgtctgatatgtgacccctaagggagtggtgacccacaggttgagaagccatgacccagagttactttgttcccttgttgtttcaaatgtatttctggaactgacctgtgctgcaagactgaggactctggctttgtgcttctccctaccttaatttttcttgcaggttgtacttggtctctgacatcctcttctaacttatttagtgcttgttattttttgtagcctcttgttttgtgtttttatctcatcccatctaaggtggttagttctgactgtctacttgacacaatctacaatcccttggaaccatctagaaaatgaagaatactctagtcacgtggtttgtggacatttctataggtgcttgtcttcattaagttaaaccatgagggaagacccagcccactgcaggctgcaaccttctttgggcttgggtccttgggtggtggaagaatggagaaggtgagctgagcactggcaggcaggtgtgcattctcgctgtgctctggactgcatgcaaccagctgcaacatgctcctgccttgactgtcctgcaatgattgactgcacttctgaactgtgctctgaaacaaacctttagcaccatgtgtactttcatcagaacatttcgtctcagcaacgagacggaaaactaggatatccttttgcccttgctccctgattccctttcttctgacaacatttactcccaggttctgtataaggtttcagagatagagccttggtcaagagcaacagtgaattgaccaactgtctcctggggaagcttgtgcaggaccaggaagggcaatagatgagtggtgaggttcatagctgaccatgtagtggataacatgtttcctttttttttctttttaaaaatatttatttaatgtatatatgtatactgtagctgtcttcagacacaccagaggagggcataggatcccattacagatggttgtgagccaccatgcgtttgctgaaaattgagctcgggacctctggaagtcagtgctcttaaccactgggccatctcccaataaccagttttttactgacatattaaagggaatattacatagcacctcactcctgagtactgaattattcttcatctctttaaaaggacatttacttaccttaacaattccattcttaactatcaaaatgaacatatccttgccatgctcagctctgtcaggtctataacccttcacagtccccaaatgtccttgattatttcattgctaatagaacctgatcaggaactttataatatgcttcaagtttttaaatatctttatttagatatttatttacagggttgtttccctctttttgggtccccaaaaccttcctgcctctcaccatgacattgattcatggagaagattaaatgtagatatttggtgaatggacattgggtgctatggatggaagtggcttaaatgaaggtaattctcatgacttacctcctgtgctggccatttgttagaacaacgaggactagggtggcactggctgttgattctctttaatcttctatgagacacttgtcttggtgagaagaatgtcacaaatgctgccattcaccatgttttctttcttcctgagtaatagaaatctgtttgctttggccctttttataacttggttttatatttaaaatgaagtgctttattttgtttcaaacagtaagtagtagtcagcgccctaagttgcttacttgattttttagtgacaaccaataaagatatttattaactccttgaaggtcatgaagtataaaagatttcaagaattttaatcatgaaactttttaataatcactttgaaaaagtgtgtgtgttactgtgtgtgtttgtgtgtagctgtgggtgtgagtgtgtggatgtgagcctgtggggtgtgtgtgtgtgtgtgtgtgtgaatgtgtgtatgtgagtgtgtgtgtgagggttatgtgtgtgagtgtgtatgtgtgtatatgtaagtgtgtatgagcctgtttatgtcccttcctgaggctcactgcacacacagtaaggtcataggacattgtattcagggttcattcccacctggtatcccgagctagtatctcgccagcaagaattcactcggacaaccagattcttctacggcaaagctttattgcttcatcagaaggaagaccccgaacaaggaaaatggtgctgcttatatacccctccgtgtgacgtgtcagctcctgattagctgctcactcattaccccactactacgccccggggtgggcagtgacttgacaggaatttactcttgcacctgtgcacattacttgtttaccagttacgcacagtggaggctcatgatggcgattgctcacggctctccacaacctggtatggaggcagggtctggctcctgctgctgctttacctgcaagcttatgctcctctgttctcactgtaattacattctgatgagctacagatgcatgccactgcatgtagctttctatgagagtttcagggattgaacccaggcttcaggcttgtgtggctttcccctgctaaacctcttcagctgtcatagacttcgatataagaaacatagaggagagctggagagatggctcagaggttaagagcactgacagctcttccagaggtcctgagttcaattcccagcagccacatggtgcctcataaccatttgtaatgggatctgacgccctcttatggtgtgtctgaagacagtgtactcacacatataaaataaataaacctaaagaaaaagaaaagaaacttagaggaaacatagttaccatagcaatgtgattgtcatgtagtcagcacggtagtgtatttgctaataccagcctttgggcttctgagtcggttgtattttatctcatacttgctaaagctattttaaatgaacactaggcagtattttactcctgagaacttaattacatttcattcatcaaagcaaggacatatgcaaatctataaattctaaactatcaagatgaataattcctttgtatcgtcagccttgtcatgtccacattcttccacatccttcaacattctttattgtatgttatcagtagggcttaatcatggttttgtttagtaagcttaatgagtttaagcttcagaattgttccctatttctttatcccttcaaccttcctgtgatttcttaccttacacattgacactggctggtttaaaaaagacagttccagtttggcctgaagaatgtcccactttttttttttttttttttttgtatttgcctataagggtgagaaattaattcttagttgctgtccagtgtaagtgatgtcaattcacaaagtcttaaggaacttgaaaaatgtactaagaaggcaatttgaacgttccacttagcactcgggaggcagaggcaggtggatttctgagttctacaaagtgagttccaggacagccagggctacacagagaaaccctgtctcaaaaaaacaaaaaaaacaaacaaacaaaaaaaaaggaatgtttgctaaaagcagtgtgtgtgtgtgtgtgtgtgtgtgtgtgtattggggtgttgttaaacgattacaaaattactagagatattttatcttctcctctctcattttcctcatttctttagacagtgatctcactatgctggtctttgcttgtgataactcatcccatagaatacgcgacttgataatgaacaaacaataagtgttattaatatggctacatgtcaagtctgatctgagcctcattctacactttagttaggaaagaaacttccttcttttcccaggtgcccatgttttctttctttggaataatgatttaacacaatcttttattgctggaacaagctagttcaccaaacgataatgactatgttcttgttgataacaatggtcattgatgctttagcctagatccaaagaactcaggaaaaggaccagtatagcaatggagctggtcactgagcatcccattttgttcttggatgatcccacaactggcttagatttgagaactacgactgatgtcattttagtcctgagaaggtatgtgctaaagggacattaaggtgtaatttacttaatgcctggtcacttgtgtgcatttttggtgcaagagattcagaagtaggcaagagaactcttgtttattagagggaaacttcaaccaacaaagaagaggtatcatgaacatagcctagagcataggatgagtgactgtggagaaggtggagcactgtttaaatagaatgtcacaaaaccctcaagcatgtgacaagtgagctgaggctgagtagagagatctgaacagagtgatggctgcagaggaaacggattttctctgaggcaaagcacatttgatgtgtctggaacattcaagggacagggtagactagaacccagtgggctgaggagaaggaagcttgcttgctagtgcactgttagggacaacccagactgggtgagttgacagaagttgaatttctagcagtctagatcctggaaggtaggtatgaagatatccataggctgtatgtctccttgagttgtggattgtgtatactcctctctctgtctatgccctgatctgtcacttaagagaggttcagcccattataatcatggcaggaacaagacagcatccaggcaggcatagtgcaggaggagctgagagttctacatctttatctgaaggctgctagcagaaaattgactttcaggcagctaggataaggtcctaatgcccacatccacagtgacacacctactccaacaggaccacaccttctaatagtgccattccctgggctgagcatatgtaaaccaccatgctgatccaattcattgtctcagatgaattggatgtctacactgcctggggatctacattgtcaataaaactctggtagtctgtgaacacctgatattccacacgttaagaagttctagacttttaaatagaagcatggagcttggtttgtttctggagtgcataacacaagtgagatgaggtgtttaagatgtggaaaattcaacctgaaatgggaacaaagagtataacttcaggaatgaaatattctatccagaattcaaggttctggtgtcctgtgactccacatgtctccctctctgaacttaggatgtcgaagaagggacggaccatcatcttctccatcaatcagcctcagtactccatcttcaaattttttgatagcctcaccttagtggcttcaggaaaagttatgtttcatggacctgcacaggatgctttggagtacttcagatctgcaggtatggctgtctattgctatgagagcttcttcattcacaggatctgcaaagagtacaggggatatcagggatgctgtttgactcttgtgcagacttaattgtgtgtgggtttcttcactttaaatacccgtggttactttgaggacaggagttttgttagtttaacaatatggcttgttgtttaggtctcttctttggcctcagggcccttatccatcatttgaacagcttgggaaaagcaccatatcatagtgtccttgctcatgtagcagatggtggttttcagttttcccctagtgtgtgatctgactctaagttgctgttgagttgttacttaacttagtggtgactttgtattttgggttcaggtgggagttttttcaaaggttcatgcagtcagctttatcttttagaaatatggatacagttacggaggattctctgactccaaatataggcttacctctttgctttccagcactctttatttgttagtgactaatcatagtcacttaaaatgtgcaaacttgcccggcagtggtggcacaagcctttaatcccagcacttgggaggcagaggtaggcggatttctgagttcaaggccagcctggtctacagagtgagttccaggacagccaggacaacacagcgaaaccctgccccgaaaaacaaagaaagaaagaaagaaagaaagaaagaaagaaagaaagaaagaaagaaagaaagaaaggagaaagaaattgtgcaaacttggcgagtctatggagtctaacaaaaatttgggctgagttcaagtgcttgtctttacaggaagagtttgcatgtatatatatatatatatatatatatatatatatatatatatatcatacacataaacatatatactctttctacattagacaggaaagaaagattgcctaaatattgtgtgattttatatgtgtatatatatatatatatatatatatatatatatatatatacacacacatatatacatacacatatatatgtatgtacatatatatgtggaaaaaataaattagtggagaaaaatcgcaagaagaggaagaagttagactgtgtcttcccctcccccccccccattctctgaaagagtgtcctcaggtttgtgttcttggcctgcattctttgtaggttacaattatgaatcccacaacaaccctgcagacttcttcctggatgtcattaatggaggtttctctaatatattagacacagaggaagacggccatgaaggtatgtgagttttctagagtcagacatttttgcctaactgatttccttcaaacacgacaatgtggttcattagaatatagctttttatgttaattaagtgtcctaaaattagctggtagactttgttgttggtcagtgctgggtgcttatgatttaatttatgaaagaatatttatatgatattgtcggtagtaatggaaatttctgttagaaagtaaatgcactcattgcttgtcatattattctttgtactgttttagataaagtttgcttaggtagccaggctgtctttgcatctgtgtgttttctatttcagttcctaagtacaggcattatagggctatgccaacttgtcacagaaagccacctgagaggaagaaacctccattatgaaaatgcccccataaaagtgggctgtagccaagtctgtagagtattttcataattagtgattgacctgtgacctggcctggtggcattgaagcaggtaagccagtcctagggcaagagagtgggaaagctggcccggggcagtacagtagatctggtcagggtcaagaaagcacaggtgagcctgtcctgagggtttgagaacaggagatctggccttgccctgtctggctgcagcactctagagtgtgggccctatacctcacctgggtaccacaatagagttgactctggtgcatgggggctggtgaactggttttaaggtcatgggagtgggagaaatggccctgtcccttgctggctgcaccactgggtgagctagctggggcagtactagagaggtcaccctggtgataaaaatactggagagctggtaggctgagcagctcagttaccactgaggcccagacccaggctttgtgttagcccactccaacatctaccccatctttgatctgcaggagcttgtgaaagagccagtcctacagatccaaagctacaggatctccatgacacaaggcaacagcaggatatctgagagaagtccccataagaatccagtaattgatagtgcagcaaaagccagacatctcaaaacagagcactgactcgttgcaatgaacatttgcaaaaggttattctgtataaaaaactgtgacatactgtactggctagttttgtgtcaacttgacacagctggagttatcacagagaaaggagcttcagttgaggaaatgcctccatgagatccaactgtaaggcattttctcaattagtgatcaagggggaaaggcccttgtgggtgggaccatctcagggctggtagtcttggttctataagaaagcaggctgagcaagccagaggaagcaagccagtaaagaacatccctccatggcctctgtatcagctcctgcttcctgacctgtttgagttccagtcctgacttcctttggtgataaacagcagcatggaagtgtaagccgaataaaccctttcctccccaaattgcgtcttggtcatgatgcttgtgcaggaatagaaaccctgactaagacacatactataacttaaagaaatttgacattttatacatttgaatgtacatttgcatgtagcagaaagcagggaccagaccattatattaaagaacgaccatccagagactgccccacttggggatccagcccataaacaaccaccagacccaaacactatggcagatgccaacaagaacttgctgacaggagcctgatatagctgtctcctggcagaagtggatgctcacagtcatccatttgtcggaacacagggtccccaatgaagaagctagagaaagtaaccaaggagttgagagggtttgcagccccataggaggaacatcaatatgaactaaccaatacccccagagctccttgggattaaaccaccaatcaaagaaaacacatggtaggactcatggctctagctgcatatgtagcagaggatggcctagttggtcatcaatgggaggagaagccctgtgtcctgtcgagattctatgccccagtataggggaaggccaggaccaggaatgggagtgggtgtgttggggagcagggggaggggggaaggggtaggggggatttttcagatgggaaactaggaaaggggataacatttaaagtgtaaacaaagaaaacatctaataataaaaaaagaatgagatgtagactttccaaatgacaaatataaagtaggtttatctatgaccatttaataaataaataattgaattggaagaagaaagaaagaaagaattaaagagagagagagagagagagagagagagagagagagaaagaaagaaagaaagaaagaaagaaagaaagaaagaaagaaaagaagagaaaggaaggaagaaaggaaggaagaaaggaagaaatgtagatccgtatgagaaagaagcctttgttaagaattagggtccagaagggaaaatgccatccagttttctgaatccatgaggtaataacagtagttaggccagtttagtgtattagtcagggttttctagagtcacagaacttatggaatgtttctatatattaagggaatttattgcaatgacttatagactgtattcaactacctcaacaatgggcaactgtgagtgagaagtctaagaatctagtagttgctcagtcccaggagggtaggtgtttcagctggtcttctgtagaagtaggttccaacagatgtactggcaagtaagtggaagcagttgaagaagagtgaatcttccttcttccattgtccttatgtaggcccccagcagaaggtgtgtaccaccacacctggacctaaaacttgctttgtcccaaactgaccttgagctcagaggtctgcttgcctcggtctcctgggatcaaaggcatgtactaccttgcctgggcctaagcttttcatggccactatacctcacaatctcagaaacctgtgtctttcagtctcaagatgtggatcacaggtgtgccctccatttctggattgtagttcattccagatatagtcaagatgacaaccaagaatggccctcgtagttagaaatgctcttctaatatgtaaaggaattacacagtagcagttgttatattctcaaatttttgtgagctgaggatgttagtcagccagcagattgcttgcctagcaagcacaaaaccttgagtttagttcctaaccctgcataactgggtctgaaggtggatgccagtagtcacagcacttgagacacagattcaggtggaccgggagaagattgatgtcactcttggctatataacaactttgaggaaagtctaggttacattaagactgtctcaaagaaaagtcaatacataacacgtgtgaaaaaaatcaacaaatagtacattcaggaattctacatgctattcaacagaaaaattggttaacatattttcttgtttctgatctttatccactttcatcacaaagatgacaaatatgaagagctttttgagagacagtatcaagtcacaggaaaactggccaatatgtatgcccagtccccattatacagtgaaacaagagccatcctggatcaactcttgggagaacagaagctggagaggagctcagccgtggagacaacatgtgtcacccctttctgccatcagctcaagtggattatctgtcaatcattcaaaaatttcaagggttttccatgggtcactgtgattcaggtaatgtgatgaattatttcaaatgtactgtgaaaggctcaagtgggaacagtttgtgtctgtgtcagtgacttctgagtcacacttgccttctgctactgtccatttgtttgtggtccctatatacttgccatgtagaaatgttcactacagcaagtagaacatgaatacctccaaacttacagaaaacttttttagtgggttttttttgggggggcagattttttattaggtattttcttcatttacatttcaaatgctatcccaaaagtcccccataccctcccccctcactgctctacccacccactcccacttcttagccctggtgttcccctgtactggggcatataaagtttgcaagaccaaggggcttctcttcccaatgacggccgactaggccatcttctgctacatatgcagctagagacacgagctctggggctactggttagttcatattgttgttgcacctatagggttgcagacccctttagctccttgggtactttctctagctcctccattgggggttctgtgttccatccaatagatgactgtgagcatccacttctgtgtttgccaggcactggcatagcctcacaagagacagctatatcagggtcctttcagcaaaatcttgctggtgtatgcaatggtgtctgtgtttggaggctgattatgggatggatccctgggtgcgacagtctctagatggtccatcctttcatctcagctccaaactttgtctctgtaactccttccatgggtgttttgttcccaattctaagaagaggcaaaatgaccacactttagtcttcgttcttcttgagtttcatgttttgcaaattgtatcttgtatcttgggtattctaagtttctgggctaatatccacttatcagcgagtacatatcatgtgagttcttttgtgattgggttacctcactcaggatgataccctccaggtccatccatttgcctaggaattacttagagggactgtaatgaccaatccaagtaggaaatttcattcaacagttgcatacagtaatgagaggcacacttgggagttcctctcagctgttttctttaattcaccagcccatcctcaagtccaagtacagacatgagtaaagtgagcacaaaggatttttcctggtgcaacatttgttgtggtagatggatggtacctgcacaaacagatgaaattcatagcatgccaggtgaaagatcagactttggagaaagtttaagtggagaaggggtggggatggctggagaaagggagaggaagaagggatgagatgatcggtagctgaaatcaggctatgaggaagcgatgccattgaacccctgtgtggggatgaggtgcatctactgtctgagtgatgagcctactaaggagtgctgtttccctatgtagaggctggtgtttgaaagcaatagctactcagagagcagttcatacacagtgcagccagacttaaccaggctcctccctgtcaggtaactgggaactgggaggagggcactctctacttttctttaaactctctgtaacaatggtcaccctgccttaaattttctgtaattttaacatgaatgccacagaaatgtagttctcccagctttcttgggccaaaaaatatttatttatgtttttatttgatgatggtgttgctgtgttatctgttggtctcagggtcttagccattagaggacaagtgatctgtcatggatctccatccatactcctgtgcaaccttcacagtcaggttacctggttattgtgggttgttactttactatcagatatgtactatctgttgagtacagaaagatggccagatgttggctgcgatgaaatttttatttttattgtttgaccttgcctggccattcctcctgcggtacagggagaaaccttaacttttccagggtctgtacacttaaggcctcagattgcagggctcttaaattttaatttaacgtactagcagtctataaacatgtgcgttttatattctcccaggattctggtcaaaatatggtgttcatctcattgtgaagatatgattaggaaacgatgtatcttaaaataatggacaaaaaaggagcatttttcactcctaatggaaattttcctttttctcattttctgtttgataggccattatcacagtcatattggctacagccgtaggcactgctttccgtgtcctaaaaaatgattgtattgaagtccagatgaggtaagcaaacttgggtcctgagtttgagacaatgctgtcattttattcaacattatataaatcaattgatacttgaaatttgtgacaagcaagcattcattatgtggtccaatgtgtagtacattgaaagctgagagaaagagcccacttttcaagtgtttatatgtagatagtatgatactatacataccacacagttcacattttaaagttctcatcttatatattacatccctaccatatttctcctccccctccccagtttctctctctacctcccctctctcctagatgcacacccatctcttctcctaagaaaatagcaggcctcccagtgacagcaccaaacatggaataaaaagcttcaagaaggttagacacatgccctcctatcaaggctagataaggcaacccagaaggaggaaaatggttttaacaggttttggtgtatgtgactctaaccatagtctaaaggtggggcaattttccaccttcctacatggagtcccagaactctgagaggagatacccccctccatatgaatcagtctcaattcctggcattctctattctactctctgccttcgaatatgactaattttggaccctgaattacagtcataaagtatttgtggtttgttgttagtttgattaggttcttgtttgttctggctgacttgatagtgcaatgtcttcatgactcatcaaagtgtggtggttgtgtggagttctcaggccctgtaaagcagaataattgtctattgcatgcatatgctattggttcattcatcttagcctagaaatgcggttttctctcacctctagccagaggtgaccaatgctgctgaatgtgtgatacatgtgtttgagccctgggattttgtccttaaggaagagagatagagttgacataccataaggccattttgttatgtgaggaactgctgccctgactccattccactgtactatttgatattcttaccagcagaacaaatgggctcaattccatattctcgcccaaacatattctttcttgtattgaacaagataccttaagaagaaaataagtaagaatccattggatgttttatgaattgtttgcagaacccatttaaagttggaatgttttcttttcattccaaaattatttttatgtgtttacttagtatgtgtatatgtgtgggcatgtatatcttacagcctgcatgtggaggacagaggacagcttataagagctgatccctccaccacatgggtttcagggattgtttgcaggtcatcaagcttggcgtagtcatctcacctgccaaacctactcattggcctgggattcttccttgctattgagttatagttatttttgtttctgaaatatgatacccttgccacatacacaatgcacatacattttctcccatttatgtgttggctttttattctgttgataatgccattggtgcatgaatggttttagcttacctatttattctgcatttgttgctcggggtcaattttcttgaatatatttggtttgttgaatgtgagtgttgggtaccaggatgcaattcagttattctgaattgtagatgccacttttgtggttgttgtctagtttgagttctaatgtggccttaaaaatattcacttatgttccagatgtagtttctcagcaacatcaccattgtcaaaattctcactgaaatgtatgtatggcaaatgctttgctcaaaactttgctccctgctacacatcccgagatcagggtacctcacaatggccagataatttgacaactaaagaaacttcaggaagcttctcttgtgtatttgtgaggtgtgtgagtgtgttagtgtgtgtgtgcatatgtatgatggaaagtgtgtctataaggtgtgtatcagtgtgtatttatgtatgtgtgagaatgtgagtgtgtgtgtgtgtgtgtgtgaatatataaatgtgtgagaaagacttgtgtgttagtgtgcatgagtgtgtgtttgggtgtaattatgccatgttggatactttatatacactcttgtgtgtgcttcatccaggtttatgtaggtgtgaatacatgtacatgtgggtcaaaatacatgtgtctccatgtgggggccagaggttgagactagattttacttgatgactctccactgtctctttcaagacaggtttctcactcaacctagagctcaattattggctgggctggctggccaatgagctctaagatccttctcagtatccttcatctctgtagtacaggtgtgaagtgtgtgcctggcttttacatgggttctaggtctgaactcaggtcctcgtggctgcatggttgacactttgctgaacaggccacctacacagccccacaaatcagtttgatgtgtgggaaaaaaacaattagttttgaaagaaagaaggataaacccagctcttcagtgggtttcctcctatgtggattggccgtcagtctgcacagaggcaattgttacaacaggcatcttctctgaagtctgaagacttggcaatcctcctaggacttggcttgtgcctgtgatgttggcacatctcaatccaccacagctcaggtcacaggatagaagatgtagacactgtcaaaggaagcattcagaaataaacccccaaaaccccaaagtggaaatgttcttggaaaatgcagacataaagaagagttttattagctgtttctacattggcctttagaaattgtgaaatactcttaagatgtatttttcacttcctctcttagagcatgttagaggaagttgaactgtgtgaaaatggcctttgtgtgtggtgaatgcttcctgaggagtgtttgtttcttttggttggtggacttgtcacttgcctacttggcagaactagagtcatataggggaaatgaaccacaattgagaagatgcctctgtcagaccggctgtaggcaagactgtgggattctcttgattaatgatgatgtggttgaggctggcccactggggacagagttatccctaggctggtggttctgagttgtacgaacaagcaggctgagcaagctatgaggagcaaggcaggaggagcattcctcccatggccccagcttccattcctgcccccaagcttctgccttgaattcctgctctggcttctcttaagctggaccattacttgggatatattagacaaataaaccccattctcccaaggttgcttttggttatagtgtttaccacagcaacagaaacctaagcaggacagttagaaacacttcctcagtatcatctattcaattatttttagggtcaatattagtatttaaaccatcaatgaagttcagaaggccagaagtcgcttctcatgcttggatccagtgttgcctttgtacattctccaagcagtgtaactgggaactggatttgaattttgtggcatatgaactcctttgggtcaatagtgttgagatggcagcagaataggaaggaactggcattaaaggaaattattacacccagaaattgatcctgtgcaaactaacaaacatatatgaaataatttttccaaaatacgtctgtaatctgatgttcattggagcactacacatagtaaccaagttaaggaatttaaatgtctgccaacattaaactggcaaagaaaatgacaattgtaatactgtgcttatgttgaaaatgggaatttcaccaataaaggatagaattgaagatttaaagaacaccattcaaagtaaaataatctaaggacagagagacaaacacgtgtttcacttacttgtggattgtaaagcagttcatcccccaggcagtgtggctgacagaggcgactgccagaggaggtgtgcatcgaagagacacatgcaggctaagagtgaaaaatccattaaactggagaagtaacattctcttctactgaaataaggtgtatggcatattcaatccagcaagtacaatatacacctcaatgtttctgagcatatatttcaaatgaggtaccataaagatgatgtagagatgggtgggtaccacttcctttagttgattaaattatttcataaaaggtataatttttcttttatactttatacatttaactaaatttgttaatctatagctaaaacatttttaaaaatcaaaagaattgggaacaaaacacccatggaaggagttacagaaacaaagtttggagctgtgacaaaagaatggaccatctagagactgccatatccagggatccaccccataatcagcttccaaacgctgacaccattgcatacactagcaagattttgctgaaagatcccagatataggtatctcttgtgagactatgctggggcctagcaaacacagaagtggatgctcacagtcagctattggatggatcacagggctcccaatggaggagctagagaaagtactcaaggagctaaagggatctgcaaccctataggtggaacaacattctgaactaaccagtaccccagagctcttgactatagctgcatatgtatcaaaagatggcctagtcggccatcactggaaagagaggcccattggacttgcaaattttatatgccccagtacaggggaacgccagggccaaaaaaaaaaaaaaaaatgggaatgggtgggtagggaagtgtgggggagggtatgggggacttttgggatagcattggaaatgtaattgaggaaaatatgtaataaaaaatatttttaaaaaatcaaaccagtaagtagatgtggcatatagtgaactgtagccagggtcacaaggtacaaggttccctttctaaattgtnnnnnnnnnnnnnnnnnnnnagagagagagagagaaatgcctgccacctgaggtcagatgtgtgtctggggcggaagggaagagtggagagagagagagttgtacatttagtagagtaggggtaaagcagatgggccttaaaaagcagcactggctgcccaggagaggactacgagcccaagattgctgctgggttctgtcatggggtgcctgggtcctctgcttttattttattctttgaggcaggaccagagttataccctgacagtcccagaattgtcctgtagctcaagctagcctcagtctgcagtaatcttcctgcctatgcctcccaagttctgggaggccaggcttcctcctcttcccagagtctcaatcccattctttcttgttcaacattttactttaatctggcctttggtagatggtaaaaagaatggagttctttacataggagcaaacttgtctccaataagatcccctcatctgatctggatagctatccactgtgtatctatacaaggagagtcactgacccctgactgtcatatgtgccaggatgttagggaccccaatcatgccatttgtcttagaggaacctgaccaggaaacacatgactacagggggcttttatccccttcttcctgcttactattatgtatcgcatgaacacaaattatttcttcataaatatgcatgcctgaattcatgtttttgcactctttggagacttcgaaactcttcaggatgatagtttccctattttaggaatactcatctttaaggatgactcagtggagatgtctgtggtaagctgttgagtggggattcccttcactggttcatgtttttagttcttactcatttgtgaaagcaaagtggctaactgaatgtgaaaaccccttggagttttatttagctttctttatctctatattaggaataatacaaattttgttagttaaattgaagtggtaggttgggttgctatgactaactgctgcaggctcagtggatttaagactaaatgtgtctccccactgcagtgtgagagtctaggggagggttctgtcatgggctcttctgtctgggtaccttctctcaagggcctctcatgacagaggctacattgctgagtcttctccaggtgaggacacagatcacattgtggggctctactctcatcgttttatctaaagctaattaactcccaaaagacacactctaagttcattctattagggaccattatcaaattgttgaatttttagaggacacacatcaatccatagatagctgccatagagacagagagggtgaatacctcatgggactcacacttcctgagttttgttattgttttttatcagaacagttctacgtttttcctttctatgttttaaaaatatttatttaactttctacatgtatgagtgtttgcctgcatatttttctgtgtaccatgtgtgtgtgtgtcggtgcctgtgatgatcagatgaaggcatcagattttgtcttagctaaggttattattactgcatcaaaacaccctgacctaaagcaaaagccggaaggaaagatttgatcaccttttatttccacgttgttgtccatcactgaagtaagtcaagagaatcttttgcctggggcaggaacctggaagcaggagctgatgcagagatcatgggaggtgttgtttactggattgttctccattgcttgctcagcctgctttcctatagaacccaggaccacagccccgggatggcaccaaacacaatgggctggactctcctatatcaatcactaattaggaaaatgctctacaggcttgcctacaactgtaacttttggaagcatttttctcaggtaaagttctctcctctcagataattctagcttgtgtcaaattgacatacaactagcctgcacaggatcccctgcaactctaatgacagttgattatgatgtaccatgtgggtgctgacaaccaaacctgagtcttttgtaagcattctttactgtgaggtcatatctccaggtctgctatctatcatctatctatctatctatctatctatctatctatctatctatctatctatccatccatctatatcaatcatctgtctgtctgtatgtatgtatgtctgttggtctgtcggtttttctgtcagtctgtcagtctatctatctatctatctatctatctatctatctatctatctatctatctatctcttacacgtgttcgcgaccggccaggaaagacgcaacaaaccggaatcttctgcggcaaagctttattgcttacatcttcaggagccagagagcaagagagcaagagtgcaagagcaagagagagcaagaaagcaagaaaaagaacaagaacaagaaagcaagagaaagaaaaagaatggcaaaaccctgtcccttttaaggagaattatcctccgcctaggacgtattactccctgattggctgcagcccatcggcccagttgtcatcacgggaaaggcagaacacatggcgggaaaactgcccctgcacgtgtgcagattatgtttactacttagaacacagctgtcagcgccatcttgtaatggcaaatgtgagggcggctccccacatctatctatctatctatcatgtatctcaatcatctatctgtcatctatatatctattgatatcaataatgtatgtatgtatgtatgtatgtatgtatctatctatctatctatctatctatctatctgtcatctatctattgatatcaattgtctatctgtctaaaagaaatgtctgtgtaatgttatttaatctacagagcaagctatgttgggagaaaactgtcctaacttgaatttgctgtttgctttttctccattctctcccaacagagctggcctactttacctgctcaccatcttccagtgtatcacaagtgtgtctgcaggggagctctttgtgattgacagggttcgctttctgtgagtagtccctgctgcactaggcatcagcactggtgaccaaaaccattacattcatagttggacctagagctttatctcatgagttactagtatttttccatgcttgtcttagttgaaaaattaacaaattatgaaattttatgcttatcacatggcatcatgtgttttgaagtacatgtagannnnnnnnnnnnnnnnnnnnnnnnnnnnnnnnnnnnnnnnnnnnnnnnnnnnnnnnnnnnnnnnnnnnnnnnnnnnnnnnnnnnnnnnnnnnnnnnnnnnnnnnnnnnnnnnnnnnnnnnnnnnnnnnnnnnnnnnnnnnnnnnnnnnnnnnnnnnnnnnnnnnnnnnnnnnnnnnnnnnnnnnnnnnnnnnnnnnnnnnnnnnnnnnnnnnnnnnnnnnnnnnnnnnnnnnnnnnnnnnnnnnnnnnnnnnnnnnnnnnnnnnnnnnnnnnnnnnnnnnnnnnnnnnnnnnnnnnnnnnnnnnnnnnnnnnnnnnnnnnnnnnnnnnnnnnnnnnnnnnnnnnnnnnnnnnnnnnnnnnnnnnnnnnnnnnnnnnnnnnnnnnnnnnnnnnnnnnnnnnnnnnnnnnnnnnnnnnnnnnnnnnnnnnnnnnnnnnnnnnnnnnnnnnnnnnnnnnnnnnnnnnnnnnnnnnnnnnnnnnnnnnnnnnnnnnnnnnnnnnnnnnnnnnnnnnnnnnnnnnnnnnnnnnnnnnnnnnnnnnnnnnnnnnnnnnnnnnnnnnnnnnnnnnnnnnnnnnnnnnnnnnnnnnnnnnnnnnnnnnnnnnnnnnnnnnnnnnnnnnnnnnnnnnnnnnnnnnnnnnnnnnnnnnnnnntaaaataaaataaaataaaataaaataaaataaaataaaatcagcgaagcaatgaagacactggcttggagtttggaatggcttagggataggtgccaggtcggagaaggactgggtgtggtaggtggaaaggattcatggttgtaaactgagattggtgaaagaagaagtatttcctaaaatgagatgccgaagagaagcaggtagtaactgcagcgtgacctcagaaggcaagtgtcaccatctttgtaagaaggggatggagaggagtctccatgaccactgttctgagagctgaagtacctcagtgagccagccttagaggagcagagtctccgtagaaagtggaaacattgtactctttccttgcaggatctgttctgtggtttagtggaccaaacgggatttctctgatgggagtcacaatgagaatgccataaggatggtggccgagggatgctgattctaagacaggaggtgtgtgggagtcagcctggagcacagggacattgtcctcataggctcgctgtggtatcagcagtcagcatagccagccagcatctgacctgtgcttgctggactaacttaataacgtataacaaggacttttgcttctgtagacatgagcacaccagtggatactacagagtgtcatcctatttctttgggaaattgctggctgagctaatacccaggaggcttttgccaagtactgtattttctctaataacatatgtcatagcaggtaagtaacaaaacttgagatatgtctttagtcttgggggatcatggtctggtttatacaactgtgataagccttaaagtaaaaaaaagtatgtctccactctgtgtgaactaaaacaggtgattgatgtgagtacagtctccaaaactcctttaaaaaagaactccaaaagctgtttatgaagaatgtagaaatagttttcaagtttgaggcagagctaattgagcaagaacatttattattagatatctatccatatgtattttaaaagatttatttttcttttatttgagtgtttgtatctctgcctctctgtctctctcactctgtctctcgctttctctctctcctctcactctttctctctctctctctttctctctctctctctctctctctctctctctctctcgtgtgtgtgtgtgtgtgtgtgtgtgtgtgcgcgcgcacgcgtgcacatgtgtactaactgaacccagtacctgggaggccagaagaggatgtcagatccctagaactagagttacaggagaatgtgagcaaccatgtgggtgcttgcaagtgaatccagggcttattcaagaatagcacatgctctgaatcactgagacatatctctagtcgagtcatatatttttctctgtgtttttgtataagtgtgtttatgtaagtaaaatattgaaaagtggataatatggcatacatatgtatgtgtgtaaaaagactaaatgtataagtgtcttacacttgaaaagagagaggacactgaatttggggtttgttgaaaagaaataatatagttattcagaatatgtgcagatttttgtgttttaaagctaggcttcatcctagactctctagaatttccagttttttaacatacacattcattgttccaaaatgagtacagataaagcttagaattcaattaataagagatttatcatctagaatcagtcatttaggtcataggattgcttatgggtaaatgttcttgtcctgaaaacctgacaacctgaatctgatccttggaatccaaaatagaagatagactccctccagaaagttgtccttctctctgatacatgcacaccatgacacaagtgcacaatgacatatgcacactatgaaacatgcacaccaagacatttgcacagcatgacacatgcacatgctgacatatgcacaccatggcatatgcacaccatgatacatgcacactgtgacacatacataccatgacacatgcacaccaagacatatgcacagcatgacatatgcacatactgacatatgcacaccctgacacatgcacagcatcgaacattcacaccacgacatattcacaccatcacacatgcagacagtcccatatgtacaccatggcacatgaacactatggcacatgcacaacacacacaccataatacatacatactcctatccacaccatgataataataataatgataatgataatagtaataataaaatttctaaacaactggggatggaattcagtttccccagattccatcttgtttttctgtggctattctaaacatacacgatgatgtatgtatgactcatgcatctgctccaacaagattatggatcagcttttgaaacttactgccctcctccgtagctgttgcatgatttcctagggaaaaataaagttggaggcatcctcccatcctctagatgttaaaaccactagctagctgcaaggttgtttaaatggttgaatcccttcttgtaagtcagggtaggaactcaaacaggagcctggaggcaggagctgaagctgagtccatggaataatgcttcctactagctagctggcttgctccaaaagacaggagcacaccatgacacatgcacactatgttttaaaatcgaattaaaaaccatatataacaatactctgtggtcacatggagggaaatgatgaaattggagacccagagtagtttcttatggaacccaggactacctgcccaggatggcatcagccatagttgtctaactcctcccaatctaacagaagcatttcctcttccctcccctcccctcccctnnnnnnnnnnnnnnnnnnnncccctcccctcccctccccttcccttcccttcccttcccttctcttcctttctcctctcttttcctttttcttttctttttcaacatatggtttctcggtataacaagccctggctgtctgaactctctttgcagatcagggtggccttgaactcacagagatctacttgcctctgcctctcaagtgcttgggataaaggccagaagcatttcttcattaaggtctcctctttccttagggccctagcttataacagattgacaaaaactaaccagcacagtccagatctcaatttccttataatacaattataataaacacaggggaatgtggataggagtgttttctcttggtcattctcctgtgagagaaggcatagaattttggccagttgtgttgcctgtaactctccatgttgggatctcataagttgttcttaattatgtataaaggaaaacaggtattatattgaaaggtatttttctgacaaatctaaaaagaaagagttaagagcgggtgatgctaaccaaatcccacatttggttcccagcacacacatcattggttagttttcaactgcttgaaactatggctgcagaaggtctggtgctctcttctggcctccgtagggaaactgcacacatgtggcatactttcatacagacacaataaatacatattttaaaaatagaataaaaaaacctccactctgtctaacgattctctgtggtcacatggaaggaaataatgaaatgggagacccagagtagttggacggctttaaaacagttaccagtctctgtgattattaaagtattatttgaaaaatgcacaattctctgacttgggtatttggactaattcggtttttttcctctaaggagtaaaaatgagtatgaagtgtttcttcactatgatatgtaccatcatggtgctggcctattctgccagttccctgccattgtccataggagctggggagaatgcagtggctgttccaacactgcttgtgaccatctactttgtgttcatgctggtgagtggggttttctcagagaaaaagttgcctctcttccttcttggacatggaacccttgggacatgacgctctatcctaaagcttattatggtctgtagtagagaaggagctgcctttcttcctcttctgtgactattgctccaatgtcagtactaggatgtagttaacaggccgtttctagtgggttcttaaaagacatttcttggagtcatattagaaaccacaataaataggaatttcagtaaagtgctgtggttggctgattcccttacaaagggaacagactgctgtcttgctttcatgctggtataagagacatgctgtcattttagtcacagcaaagatgacttggctcatttactagtttctaatgggaaagcaaaagtcaggagaatataagtgtttatcaggaggactctatttcagggctcccttgtgttctgaaaagcattagaaacaatgggagattccagaatccttagcacgaagtcagtttcttgtgttagcatacttctgctcatctttgtaaaatcggttactcagtcttagtcttgtatgcccacaaattatacacaatgtatatcaatcaatggacaaatggaaccagagtctacactttcccaccaagctgatcaggtgaatagatctattgagtgtgctgctattcaccccatttcttctggtgcaagaacatcctgtagcttggcaatgggggatgcatggctttaaggaagtgcccaggtttgttcctgtttcctattaatatggtcatatacatatgatcatccagtaatataaatcttcagtaaatatgtttttaatttaattttgtttgagttatataaatgcctataagatgttttgttcaagtccacccctattttctccctccaaaattgactgagaaatgtccccgagccttagggggccatggatttgatgggtaaagtatgtcactggggcagctttgggtggctgtggtcttccccctctgctgtttcctccctgccttttgcattcatgggaacacatgagcattcagtttcctgatcccatgttcatttctgctgcctgctgtcataaccccccgccaagatggactcttatcactctggaaactgaatgctgaacaaactctctcttctacaagttgcgttggccatggtgctctgtcagcatcaggaaagcagctgctacatatctagtcacactcactactcctcccatcccgcctcatgttttgtttcacttttttttttttttggtttctagagacagggtttctctgtatagccctgactgtcctggaactcactttgtagaccaggctggcctcaaactcagaaatccacctgcctctgcctcccaagtgctaggattaaaggcatgcgccaccaccacccggctttgtttcactttcatgtccacttctcccctccatgctgggatgtgtcaggcttgatcttgttcgagtgtttcacatgttgtcacaactcttttgctttcacatgtgtcactgcacaattatgactggacgacactgcttcactgtagttacccactgcttctggctcttatagtctttctaacctgtgtttcatcatgatcttagaaccttgaggggaggggtgtaatacagattccccgtgcacggctggatcctttgcagtctcttttctctgcatgttgtgggtcacagtgtcaaccaacatttattgatgttgtgggtctctgtcaatcaccatctactaatgttgtgggtctctgtgtcaatcaccatctactaatgttgtgggtctctgtgtcaatcaccatctactgattttgtgggtctctttgtcaatcaccatccactgatgtgggtctctgtcaatcatcatctactgatgttgtgggttgctgtgtcaatcaccatctactgatgtgggtctctgtcaatcatcatctgctgatgttgtgggttgctgtgtcaatcactatctactgaggttgtgcatccctgtgtcaatcaccatccactgatgtgggtctctatgtcaatcactatctactgaggttgtgggttgctgtgtcagtcaccatctactgaggttgtggatctctgcctatcaccatcacctgcaaaaataagcttctctgaattaatgtctgaaatatactaatctatgggtatagcagtaactcattagacatcagtttaatactatattcatttagaagaataatagcagagtctcctctgatacttatgaccttactagccacagcatcacacaggtttgtatcctgcagagaaggccataatataatcagaaaatgagtgtttggttactgccatggtagtagtctgtctagtgtcccccatgtgtctccttttcacccaagggaaagaaaagaaaaaaaaaaagcaggcagaatggtcactgtctttaagcatacttgcaatttaccacgaaactcctgcccccactcccaggctgatttcagcacatttagctcagtgcccatagtttacagcacccaatcaaaatgttaagtcaccacacacaagagacaaagaaaaagtgatgaaacattctgctcattaattacatcaggacatggactcgcagcactctgcctagcctactggcctgcccatcaacaagtggctataaaggaagccttggcattctggttcttagcgctaaaagcctgtaacatacttaggtgctcctgttgggagcacaccaccagaagtttttggtgtatttctctctgtggagtcctaacaaatacaccttaactactcaacataaggcgaaccaatacgtgttgtgttgttagcaaagaatccatcaccacgtgtccttcacttgcttgctttagcagaacatcctctctcctgtaagcccctttaacaaaacagtccttcacaagtttgccttagtccttcacctgtgtccatttcagaaaaaccctccctcatgtgattgcctcagctaaacactttccaatacaactgactttccaaagaacgtttacatttacatttcacccctaacatgtttcagatgtgaacaaatatgggcaccctgttctgaagccgataggcttcttaatgagatagtgaaactcaccagtagatttcaatagcaacaacaaagacaaactttaagatactgtattcttgttattggtttaaaagattgggctttactcttcttctgtagcctgatgataaagaaatagttgctttttaaatgtatattgtaaacagtcatacacccatgccccatggaatttttttagagttagttttaaaaatgtaataagaatgtaaatatgatgcttggtatgttggagcacgcctttaatcccagcacttgagaagcagatgcaggtaaatctttgagagtttgaggccagcttgggctacagaatgaatttcagagcagcagggtctaaacagagagaccccgtctcaaaaaatgaaaaacaaacaaataaaaaaacagaagaaagaaggagaaggaagtgaagattaaactgaatatttccagaatggaaagaaaaggtttatgtaggttttaagcgaccaagtaagttatttatgatatataagcaataaattttagagatgatagacagagtattacaatttgtaagtgaatggtcaggatattgatgtcaaacctttacttaaatcaacagaaatgatataatttacaaactcatggtaacagttataaacaccaaactggcttctaaagctttatgcaaccaatttcacttatcacagataacaaaacgaaaattcatgtactcaatgtaattacttgtggttttgctacctttgtttaactgaattacttggaaaaacaaaaccaatttcatttcaaaatgtctgagctttatctgcatgttgcacagagttaaattgacaaggctgggaaaactagactacactagtctatctccaacaaagcttggaagctacagccaagagaataatggtggtcagacagaacatgcagtattttggtcattgtcttcttaggtcagataggatgcagaacaatgagacccttctggtaaatggtctgttgcagagaggtcatggagtgttgagagactaaactctgaccattctacatcttacaagaaatccactggggaccccaagctatgagtgatacaatacagaggttacaattgtgtgtggattttcctggttggtattttgtcagagcaacttgaaagaagctctggtcattttgaagaggaaacattgtcaaaaggtggtgtggtttgcctaaggccagcctggtttacagactaagttccaggacaaccagggctacacagaaaaaccctggagagagggagagagggagagagagagagaaagagagaaagagagagacagagagacagagagagaggcagagagacaaagagagagacacagagagagacagagagagaggcagagagagagagagacagagatagacagagcaaaacagatagtgatagacagagagagactgagacagagcaaaacagacagtgatagacagagagagacacagagagaatgacagagagagggagtgaggagagaaagagagaaagaaaacaccagcctcagtacctctgttgagaaaatgattccatcagattcacttatagacaaacctttggcggtattttcttgattgattgatgtgggagggcccagcccactatgtatagtaccattctgggaaggccgtcctgggttgtataagaaaataggctgaggaagtcacaggtgtgtgccagtgatcagcatccgtcatggtccctgcttcagctcctgcctccaggttccttcctccctgagtttctatcttggctgctcttaatgatagaatatggtcagcatggtcagcgaaataatctcccttttctacacactttagctaatgatgaggttttacagcaatagaaaccatacttatgtaggagtctatacaggtatgttacagacatgtgtgttaatgatttgtaacttaccaaaacagaaaaagggggttggagataattacaaaatcagatgtgagatctgaactgaaaccctgttggggtatccagatggacttccaccgataccaaggatacaaatcaacagacaaacataactgtgtactgataggatgtgccacctcctcctatggacataggcctcttcccttccttccaccactgttgcttaataggacgaagagtcttagagtgactcatgactaaatagatttaattaaggttaagatagctcttgaggagaagtgttctctctccacatgagtgtggcatggcctcctgcatctccgtatatccacaagccttctccccagggaaactaaaattggattctcataaatgatgtcctggatctctccttccccctcttagtttcacccacactcctctgataaaaactatcagcttatcatctcctgcttgggcatcaaacactgataaacaaaacaaaacagaagccaaactgaagccaccctgggagggcccctatactgagatgagaactgaaaccaccaatagaaggttccagagggggactacatcacccatcccagtgcttagggaaataggaaaaaccttaataattttttaaaaaatcttgtttatgattttttaaatgataatacaaatttgtcaacataatgaaagcagcttttctactaagagttcagttatgagtatctagccttagacttaattaaaaaaaataaacagaaagctttctttgggacagattcatgtgtcccaggttttcccctttggatcatgcaggcagcctttaaagttaattctgaagagcatcttaacaatacctcattccctaaaggacacacagtgttggtagagttcactttgttttgccttttgctagatgtgcttgtaaaactggatgtagagaactgaatatttgggtgccactatacagtgcatgtgcccaaggagtgcttgctaagtatgcaaggcaggaaatcactgggctcgtgtatcctttgatttgaatgggacattgatcctacagagcaaatgacattcagcctctttatgaggacacgtggggtgataaagcttgccagagtctgctgctcttgttccccgatgtccaggcaagcctctagaaaccctcttatcagtggagaagataaattattcctcatacaaaaagggatgtattctctcaccaaagggttgcaatccttccagtcggtggggatctctccagtaggtggggatccctctagtgggtggtgatccctctaatgagtggtaatccctccattgagtgatgatccctccagtgaatggtgatcccttcactgagtggtaatgtctccagcagtcttgctctagttattcaggtttggtctggctacactgcatcttttgatttctgcgatttatattggaattttgatggggactgcattgaatatgatgactgcctttgataggatgttgcaataaatctccaacccaaataagcccgggcaaagaaaacacaactaaattaatatgaatacatctgttagcctagattgggcagatttagcgctacactaccatcttccccatataagagacccttataactggaggtctctccaggccagctgcttctgctccaccttccttcttcctcctcccctgtcagcctttctttctctgtctccttttctcccaaaaccttcagctccaccttcccttctttctctacccaatcaccagctctagcctttatttataaattaaggtgggaagaaggtttacagcaaatcacctgagtactgactcattccttgttcccagcccctcataggacaacagaattaacttcaaatacaattggccccggggctagccacaacagggtcttttgtatttccatgtgaaatctgaggtgtttttttttttaaatgtctgtggtttatattggaattttgatgaggactgcattgaatctgatgattgcttttggcagtatgtgtatttgatatctatctatggaatataagtataggaggtctttctgtcttttagtatcttcttgaatttctttattttcagtttcttaaagtttttattgtagaaatatttcagttggttggatttattccaagacattttctcacttccccatttttgaagttattgtgaatgaaaatttttctttcacttctttcccattaggcttataatttttcatggcgttttatcagagcaagaggaaagtaactaaaacaactggtcattgtataaattttctatatgtgaccttaaaaactagttctgaagctgaatgttgtattttatgcataagcatttgctcagggcaagtctgaatgcacacacactgtggtccctttgactagtctagtatactttagatgagacagagcaagtattatgtgaactatctcctgctcatccccatcagtcttttctggcaactcattttgaatctgatgtttggtagctttataaaatggggagattggccactttttctgctgttcttcatcaacactgtgtagtttatcagttctaggcttgaacttgtcttaaggctgttgtcttagtcagggtttctattcctgtacaaacatcatgaccaagaagcaagttggaaaggaaggggtttattcagcttacacttccatgttgctgttcatcaccaaaggaagtcaggactggaactcaagcaggtcagggagcaggagctgatgcagaggccatgaaggaatttttcttactgtcttgcttcccctggcttgctcagcttgttctcttatagaacccaagactatcagtccagggatggcaccacccacaatgggcccttccctcttgatcaccaaccaaagaaatgccccacagctggatctcatggaggcacttccccaactgaagttcctttctctgtgataactccaacctgtgtcaagttgacacacaaaaccatccagtacagctgtattttaattgaatcccaaattactcctagtcaggaatagagagtcaacactcttataagtaataagttttattgatcgttggaagtagaagtgggtgtctgttgtttagtgtttatcctagtgagggtttctactactgtgaggaaacaatatccccaaatatcttagagaagaaaggctttgagcttatagttctacttgttcatcagcaaaggaggtcagggaagaaactcatgtttggcaggaacatggaggcaggggctgatatagaggcaatggaggggtgctgcttatgggattgctccctatggcttgctcagcctacttgcttatagaaaccaggaccactgcctagggatggtactacctgctatgggctgggccctaaccttttaatcactaataaaaaatatcccactgagttgagtatgggtgattttatagaggcattttcttaattgaggttccctccattccagtgaatttagtttgtgtcaagtggacaaaaaatgagccaagaaagcattctttcagtatgtgttcctagatggcactacttttatttgtatagtaactacacttggcctgtcatattgtcagagattcaaccaatcatatattaacaacatatgaaaccagtaatgtttttgttctgaatatcgccactccctgaattacacaatataaactatgtagctaaataaattagatatcataaggaatctggaatgattgtaagtatgtagcatggatgtatttacagcttaaaggatgtgtgtagattgcatgccatcttaaagataacaaaagcatcaatatgatttggtttctgcagagtggggtgacagttccttctttcaagaaccacaaagaaccttggcattgacaagagtaaagactttggtttagagttaactgaaagaatgttttgaaagatctgatctgaagtagaaggtcaggagtagaaatggtcagaaggatataggggtcttgaagagggaggagcttgcctagaattcttagttattggactggcactaacttgtaattctgctctttgtagtttttttcaggtctatcactatattctggaagcttcctgcctaagctctcatggattcagtactttagcattcctcattatggatttagggtaagctggcctttctgtctctgtacttgggttctctgattgtagtaactgaaatgaatccttcccaggtcttttcattagctataatctctaaccagctgctgcccagaaatgtccttccaggagcaaaagatgaacaatctcttgttagttttacttagcctatggtcagtaagttgcctgtgcttttcccctgtcatgtgttatttgagagaatttaagggtgagagaaagctcagagtaaaggggaaagttagatgatgtgatgaaaaacgaacaaaccacagtgtttctgcccaatgaagaattgatgacaggatcagagactatgatatatggttcatatcaggaaattaacagaaacagaaaccatgtaatacccacagtcgtattggcctcacaagctttctctgcagcagactgtgccttaatatactttcacttccataattactgctggttttgattaaaacaggcaagaaaacattgttattatgcctcaatagtattgctttaatttttagcttttatggggttgcaaaactagagtgcaaagaaggggaatgtgtgggctaatttagttagagatttcacattttagtcaatgggaaacatcattatttcaatcttaagcctccagaatctggggcagtccaggcagggacactggtgtgctgagaagactgtgaacttggtagggatgtgtgtgtgtgtgtgtgtgtgtgtgtgtgtgtgtgtgtgtgtgtatttgtatgtgtatttgtatgtatatatgtggtaaagattgaacttgaagatacagctgtgtttattctttggaaactatggaaatataaaactattggcctttccctgttcctacttgcgttacaggctctgctgcataatgaattcctgggacaaaacttttgtccagaacacaacacagaagaagtcagtagatgccataactatgttatgtaagcttgagttctgtgtcacaatggggcatagaatgttagtagactgagagggacctgaccgtccagggttaacattctgtcttttgccagttccctgagtctctccctgtgcaccagagaacatgtatcttgaccctacttcttcatggggtagagaatgtgtagaaatggggttcttagggcatcttagaaaagagttttggtgatttgatagtggatttgggttgcttgtttcagaatatatgagtttgacataagctgctttggtaagttagcaaagccgtatggattctaaatttatagggtatgaaacctatgagctgaccctgataatgtcagggcagcaagggtgagctttgtctgcctgcattcacggtcctccctctgccacacactctggaagacttcaagaaacaaaaggccagtttttttgtttgtttgttttgtttttttggtgtgtgtgtaaaatgtcctatcaaagaatatccacttaagtgaaagaaacaaatatttcagcatactgagaaaaatctcttttttgctaatactattaaaatacaaacatatttttaataaaattaaacttttgaagttagattaccttcattttctgatttttctcatgatttgattttgatataaaaatgaaagaagaacttctcatatctctcatggatattcaaaataatactaaataatagcaattcaaatttgtgttttgaatttgatgataagaatagctatttggagagagaccttatttctcacatctgctttcccatggtgtggcctggcctctttctaatacagcttccttaccagtttctggtcaggaggacatggatgggaaagggaaagcagaggagaccatccacagacttccttatcacagattgtcctctcaagagcaagaaatctgctctttcagtggatttgtgacctgctacatcctaagaaatacaaaggaatggagagtcccagggatggagaggcaagggcagcaattgtagctgagacagaattctttgcagcagctcctttcctaaccagtgtaaggcccactgaatgcagctgggctcccactggtaccacaggttcagtttgtcaccagtgctgctggggacatcctgtagctgagcagctgtggttgtcacttcaggcttagtacaggaatagactcccagctgaaacttttttttttttttggagtattgttggctttattttttctattagatattttctttatttacatttcaaatgttatcccctttcctagtttcccctccaaaaatcacctatccccttccttctccccctgctccccaacacacccagtcccattccttgtcctggcattcccctatgttggggtgtagcgccttcccaggaccaagggcctctcttcccattgatgaccaaaaaatatagaatgcttcatgaatttgcgtgtcattcttgcacagtggccatgctaatcttctctgtatcattccaattttactatatgtgctgttgaagcgagcactagctgaaactcttaatttcctttggttccaggtctagaattctatgcatctgttcttgtgcatgactgtctcctgggtcaggaaaatgctgacagagcttagatctctttggaatgcttgtgtcattaggaagctggagttttctgctttgggagtaacaacaatacttgaaacatgcttttgcctgttgaagagagcagcattatagattcagaaaggaatgacaccgtgaagtctacagagttggatcatagtgtgactctgtaaactccccaagtttattaggccttcatcctgtatgcttttaagtggatatggcagctacacttctctggatagtttttgaaattaacaatggtgactgcctcacatagattcagatgattggcataatacataacaaaattgtaagcacatcatgactactgtgattcagataaaagggagaaatttttaatgatatgttgagattataagtttttaagggaagcaacagtgaatctactaaataactttgacattacctttgtgtatgttgaattacagatgtactggtgaagaattcttgatgatccagggcattgatctctcatcgtggggcttctgggagaatcacctggctttagtttgtacaatgattatcctcttaacaattacctatgtgcagttattacaggttaagaatattagaaatttttagttcctgggggaggaattttctacagttgtttaaatagatgtgattccaaacaatcctctgaacattaataattatactcgtggacaaatgccactgagaggatccctcttctgtgaactgtgtgaatgcagagacttatggctgctcacagtacaaggctaaggaacacgcaaatgtttatctccaacagaacacctatagcaaaccctctatagcttagagcattgtggaatatgggagaaagagtgcaagagccagatgatgaaaagaaggaatggaaatgcagtattgtggtcatgaacagacatagcaaccgtggtctgtgtcccaactccacagcttaactgcataagactggatccctcatcagcacaggaaggaacagaggggacctcaatgatcccatccaccattctgctcagctattggctactggagagaggcagtcattgattcacatttacactcacatttgagcctacaggaatccagtggaaagtctgaaacccttcatcacacagacagccctgtttaaaccctgggggggtggtcacatgataataccaaagttgtgaaggtgagaaagacacttgtaaagaggagtatgtcaagggagtgtaagggagatgagagaggtgggacagagggggaaatggctgaaatgaactatatatgtatatggaattgtcaatttttaaataaaaattacaaatatacaaaaattgtaaaaaataataaacattgtcatttgtcttatactgtaaatcagcaataaatatatgtttaagaaatcacaaaataataagtaaaagggtctaagccctaaacgtctacagagatacttgctcatcccttgtgtttctgtagtgcataaaataaaaacttcaacaacgaagacaatatgtctcctgtagaattcagcaactctatcaaaaacataaaaactgatctataggaagatgcatttggggaccattgaacattaatgtattagtgttcaatgacataagtaaatgaggtcttctgggtcttggtgtcaagtcatatacactaactgatagcttttgcaataatctgtgatgcttgtgggaatccatagagtcccctgtgacaaatgtctcaacataatgtaataaattcctagcactgtagatgacagacatcttaattggtaattaattggctggcttattgtgcccttgtatcatccattatatggtgactctatttaaattcctttcataaatgtataaaatgtaggatagcactatggtatgtagcaggaatggtgggccacaaaagcatctcctgcaggaggacctaattgaatactgcctgagagaacaaggattgctggttcgacaaagccagccaatcaggagacgccttttagaagaggtgcatcctttgtctggcctcgcccctcatcatggactgcatttcccatccctgagcagagtcttggcttccctgaagcccagcaccagctaggcagcagaaagggaaagcagactcaatgtattcagaggttaggtgtccaaggaggctgtaaccagcggaagtacagataggactgacagatgcactggccaatcagagcctccatacgggtgtgccagtcagaagaggaggtgggttcttcctgggatcccgttgtggagcccatgcacttgagcggatttaagtgttctggtgagctgtgctttcacctcaattgctcagtactgagggaagcctaaacaagctctgaagttgcagcatggccagcatatgctcactgcccacaaaggtgaggagcgggagcatactcggggctgggcaggaaccagcagcttgatgcagctattatacattgtcctggacatcaaaaaggacacgatgctgtgacaaggggaaataacatggctgatgttaaagctaaacaggctgcactcggccctaaggtactgcccttcaggactccacagatagaacctctccagaaagttgctctgccagaactggaactgtgcagccagagttttgagtatacccctgtagatatgaaactaatggacaatttagggtttactgcagaaaattcacagggccaacgagcagccaataatggtaaaataatattaccacaaaaagaagggaaaagatttattgaaaatatacatctgctgtcccacctgggagccaaacacctgcaaacactggttaaagcatctactttttatgttttaagactctctgatgttgcagaagcagtagttaagaactgtgtactgtgtgccatgactaatgcaggacattccagatatcctccagggagaagactacgaggagatcgccctggagcctattgggaagtagattttactgaaggaaagtcagctaagtattgtaataaatatcttttagtttttatagataccttttcaggatgggtggaggcctacccaacaaaaaaagaaactgccaatgctgtggttaagaaaatcctagaagaaaagtttccacggtttggattacctaaggtaatagggtctgacaatggacccacctttgttgcccaggtaagtcagggactagccatccaactggggattgattggaaattacattgtgtttatagaccccagagttcaggctaggtagaaagggaaaaaaaaaaaaaaaaaaaaaacttgactaaattgaccttagagaccagtgggaataactggacagccctccttccctttgccttgttccacgtaaggaacacactgggaacatttaagctcactccatatgaaatcctgtacgggggtgggggggtggggggggctccggggctcccctgctcactgaagtggggagagtgttagatcctttaaaatttaaccctggtcctgcattgtttacacgcatgaaagccctagaagtggtcagaaacactgcctgagagcagnnnnnnnnnnnnnnnnnnnntgctgacctgtggcccaatagttcttaataaattggtgctgtccagctgttagtactaagacaacaataccagtctctgcagaaccttaaagaagagattgcagtttagttctaagattagaactagtaactagaagaagtggggaatgaaagatcctgacagaatgtaaaaggtcacagaagccctgaaattggcaagatagatgtcactgttagcagaactagcttcactgatttagaaaaatagaggcgcacaatgctctggccactccttgaacctgtgtgtctgccaatgttttgaccgttccttgaacccatgtgtgtgcccactgaaaaagcccattgccaggtagatgtttgtgatattggttgctgagaaaaagtcagaaaatctccccggaaaccacagcccggccaatctggagttgctacacctgcaccagactctttccttgtatccctcccatacccatttcttgagaatagacattgtttagatctggaaatcctctaactctcccccttcttctccccccccccagggcctataaaaactgggacctctttcccctcaaggtcggctcctctaccccagcgtgggatatgagttgtccccagagctctggctttccccgaataaagcctcatgtagtttacatcaagcttggtctatcatgagttcttgggtgtccgctattgtcctgaggcctgagcgaggggctcctctcagagtctttcaggcccacttattcatcctttgaacagcttgggaaaagaccatgtagcagatggtgattttcagttttcccctagggtatgatctgactctaagctgctgtggagatgtcactcaactcaggagtctgttctaatttcagattcaggccttgcttgtggcctgtagagactatactattcataagacttcatatttttggtatgcctggttttgtcagagtcagattgtatggtgagtgctttttataagtccatgaagtcagcttcatctgttagaaatatggatacagttatggagtagtctctgactctaaatataggcttaacactttgatttccagcactcttgaaatgtgcaatatttttgaatctatggactcaaataaaaatttaggtggaattcaaatgtttgtttcccaggaagactacaaatgtatacatcaagtctacatctattgtaagtctacatctagtctatgtctatttattgtatatgtgcatatttatagatagtatcagcataaacatatgggcacctttcagagcccagagctgcctgtgtcttatgagagaggattacaaatctatgaaatgcagttctcagtgactcaggagcattgggttgagggtgaaagacaattgaatgtgtacatataaataaatgggaaaagagtctgtgattcctcccacttttttctcctgtgtaattgtgatgagtaatgggggaagaatatggataaataacagtacttatgtcccctgggatatatggtggaatttcaaaaggagtacacaatagattgtgatgttaaactgtgtcctggaggtctcttgaaattctgtgtaatagactggcctttgtgtggactgagatgacccaaaccacagctttccctaaggctgttgctcctgttgcttgacagcctgtccacttcagtttctctgttggcttttgctcaagggagttgttcacctcttaaatttcatatgcatctgcaacaattacagtcttcacctaagaaattgaaactaagtcaacattgaaaaacatttgtgagctttcattccctagtgtggtcttgagcatgagcagcaacttgggcggcttctgcaggggatcctcctccagcccctatcttgttccaggaagttggcagccatccatggcttagtacccagcagcaaggagccttccaccaccttgaggctgtatgacttgcgcatacataaccattttttatttttttattttttatggtttttcaagacagggtttctctgtatagctctgactgccctgggaactcactttgtagaccaggttggcctcaaactcagaaatccgcctgcctctgcctcctgagtgctgggattaaaggcatgcaccaccatgcccagcttgtacatacataaccaaagcttgccttcaccttaaagcactttttgtttcaccatgaagttggatatgatccttttatatttttatattttatttcttaaaatgttaaagaaaattcatttaattacttaagtctcttaaaaatgaaacttcatactatggctcaagacttgccatctttaaagggttactaaacaaagctaagccctggattaccaacaagcctgttgcttctactgccaagtctgaacgtgacatccccaaatttagcacacactcggaacttcttccactgtgagacagaagcctgcagagcacttcatgggcgttgttattgtctacaataagccttagacagacaatgaggaagttgcgatcaccgatttctttcattggcataagaaaatgcaaacttctggttattaaaatgaataattagtaagtatatcttcattctgtggctacagatcctcatacaattgcttatttgattataacgtgctaagatatgggcactaataaaatagaatctcaatttctaagaacataccccttgnnnnnnnnnnnnnnnnnnnnnnnnnnnnnnnnnnnnnnnnnnnnnnnnnntttccatatgtacgatgctcagggatgctccaggttgattctgactggtaagtaaagatgctgacaacccaagggctgtgcagggcaggaagaggagttttatgattcacagacttgggagagataagaaggaagagaaggagatttggcatgtgctgggggagggtcaggagataccaccaatgagaaggtgaggaataaagagcatagccaacatgtaggagacagaggatagtggccctgaaagggctgcctgactgtgtgaaggacagcaaagttggaatatagaatttggtaagcaataacttaggaagatcaaagggagatggattgacaatatagcggacaggaaatggccctgccattgagttgttttaggcatataaaatataactgctgtgtgtgtgtgtgtgtgtgtgtgtgtatttcattaaggaaagtagtgaaagatccccgaggggagtccctcttcagggaggcgcgcacccagtaggacactcagaccttactcgttgtaacaacacgaggcttttaatggcacacacacacacaaacaacaaaagagcgctcaagccagcatgctggggtcgaaactcatgcacggcacaggggacaggggagtttgatcccggcccaaacttcttacaggcttataaaggcaaaaacaacaaaccaaaaagggagggagccgaaggaatttgcgcagttacacatgattggcttatttaaatgtcggcaaggtgattacaagttaacagggcagtatatgctagttaaggtgtaggggggcacaaaggcttggacttctcgaggtcagcaggacacctggtcagtgtatgatttatggtgggctatagggaggcgccacctgggaggcgccatccctgccaggtggccatttggtcctgatagccctggctagttcctgcactttcttttttatcttttatggccggatattcttagctacagggtggatctggctgtacctggatccgcctgggtctattcttcagccctgaatttcttgagcttagataccacaatgttataagacccaaaattataagttttctcttcattccccacttctttttgtggatagctctaatcttagagtgatctttcttcttcttgttgaagagtctgatattgctgtctgaggaccatgatttgtatggtgtttattctatctttaacaaaagcagccagcttatttaaaatacatggcccaaaagtaagcaggaggaaaaggataatcagagggcctgccagggtggatataagtgtagtaaaccagggagacctgttaaaccaattttcgtaccatccttgatatgcttctctttctttgtttcgtttttctaacctttctctgagcttagccatggagtccctgataacaccagaatggtctacataaaaacagcactcttcttttagtgcagcacagagtccaccctctttaagaaaaagaagatctagccccctcctgttctgtagcactacctctgataacgaggtcaaagattcttcgagtttggtgatggactgctctagcgctcctaggtctgcatccatagcggtgcgcaattcatgaaaatagtggggagcctgtatcaaggcagttgtgcctgtgccgaccccagctgctactcctagacctaaaaggactgctaaggtcatggtaataggttcccttttatagcgggtccggtggtcgaattcatcgacaaaagagctgtcatcatgatacaggagcctcggaacaagctgaactaaaannnnnnnnnnnnnnnnnnnncagtacgtgctagttaaggtgtaggggagcacaaaggcttggacatctcgaggtcagcaggacacctggtcagtgtatgatttatggtgggctatagggagacgccacccgggaggcgccatcctgccagatggccatttggtcctgatagccctggctagttcctgcactttcttttttatcttttatggccggacattcttagctacagggtggatctggctgtgcctggatccgcctgggtctattcttcagccctgaatttcttgagcttagataccacaatgttataagacccaaaattataagttttctcttcagtagaactttggtgctagcagctagtaactcggagcagctgctgccactgggatcagtttggtagtttaattgggaacacctgcagtccttaacctctccaacatgtttaaaattagaaaaaataaggctgccactcatcctggacctgacatgcttcttactgaggtaatgaaaaatcatcaattcatcacaactacaaaaacaaagatcaaatgagcatgttatagttaccgattaagaaattgtttttattattcggtatcctgatactaaggaaatagttgcatttttagcttcatgctctcaatggtcaaacatcaatgtcctttggaatctttaaaatgtaagttaaaaaattataagaatgtaaacatgaggcttggaaataaggggcaagtctttaatctgaccacctctggagcagaagcaggaggatcatagagttcaaattcaacctggtctgtgtagtgttgaattccaggacagccagggctacatggagtaacccagtctcaataataaaaaacaacaaggagaaggaagaggagaaggaggaagagaaggcaatgattgagtttgaataaataaaggtttatctaagaagattgggatggctggaattttccagaatggaaagagaaactagaaagtttatgcaagttgcaagtgtacaactaagttattaaagatatgtaaatgttaaaccttagagatgatagacaggagccgggtatggtagcacacaccattaatcccagcacttgggaggcagaggcaggctgatttctgagttcaacgcaagcctggtctacagagtgagttccaggacagccagggctatacaaagaaaccctgtctcaaaaaaccaaagggaaaaaaaaaaaagaagaagagatgatagacaggatatttcaatttgtagccaaggaccaatgcatttatgtcaagcctctaattaaatcaacagtttccgttaactttgaccaatcatggtaacagttataaactcttgcttctaaagctttatgtgtgctgtttcaattatcacagatacaaaacaaagatacatgcaaacaatctaattattgtgttttaaactttgttagattaaacgattaaaaataaaaccaacccaacattcattttaaaatgtctgagcttcatctgcatgttgcacagagtttaagtgacgacactgggaaagctatgatatttctttttttttttttttttgaaacagggtttttgtgtatagccctggctgtcctggaactcactttgtagaccaggctgtcctggaactcagaaatcagcctgactctgcctcctgagtgctgggattaaaagtgagtaccaccatgtccagctgactatcttatttctaacaaaccttgaaatctacagcaaagaggacataatgttcagagaggacatgtagtgttttttcttcctagttcagtcaagatggaggacaatgacatccctctgagaaatggtctgttttagagaggccatggagactatcgagagaataaactctaaccagcctacactttacaggaattcaactgtggacctggggctatgtatgggtggtgcaatacataggttgtaattgtgtgggatttgtgctgggtaccttattgtcaacttgacacaagctacagtcacttcagactttgtataagagcagacaggaattcactgtctcttggctgaatgaatttcttgttctcctctggtctcaggtatagaattcattgcttctgttcttgtacatgagtgtctacagagtaagcaaaatgctgacaaaacgtttatctccttgaaacatctgtgtcattaggaagctggggttttcttctacaggagtagcaatacttgatccttacttttcctctttgtagagagcagcattatagatttagaaatgaatgacattgttgtgtctacatagttggatcacagtgttgctctgagaacctgccaagcttattaggacatcttccaatatgcttttgagtagatgttgcagctatccacaattggattgttttttaaattaagtaaagtaccagattgaagacaattgatggattgtaataatgtataacaaaattgtaatcatatgaggactagtatcaattaaataaaaagaaatgtttaatgatatgttttaactatatgtttataaatggaagcaacagtaaatatcctgaattaggtttgacattacctttgagtgtgttgtcttacagatgtgctggtgaagaattcttggagacacagggtttccatctctcgtcatggggctccaactcttatcatggggtttgtgagagaatcacctgtatttag

SEQ ID NO: 3392 - DNA, 2277 bp, Mus musculus
accacagaggctccaagagctctgcagagcagaagccagagcctcttgcaccttccaaagacccgagctgcaaatcttcctgtgcaagtagcaacctgagcccctgcattatctcacagtggaagaaagaacctcctgagatggcttctaataatgaccccactgtaatctcaatgatagaaagacatctttgtgaccttcctgaaacaaacaccagtgacctgaagacattgactgaagaggctgtgttgagttttcacaacatcagttaccaagaaacagtacagagtggctttccacttcgtaaaaaggcatatgtgatagaaagactatcaaacatcagtgggatcatgaaacctggcctcaatgccattatgggacctcaggatgggagcagatctttgttgttagatgtcttagctgcaaggagagatccgcgtggattatcaggagatattttgataaatggcaaacctcgacctgctaatttcaagtgtacttctggttatgtaccacaaaatgatgtggtgttgggcacagtgaccgtgagagacaatttagagttctcagcagctcttcgtctcccagtgactataacaagagatgaaaagagaaggaggattaatgaggtgcttgaacttctgcatctgaataaagaacaaaatatcaagcctagatccaaagaactcaggaaaaggaccagtatagcaatggagctggtcactgagcatcccattttgttcttggatgatcccacaactggcttagatttgagaactacgactgatgtcattttagtcctgagaaggatgtcgaagaagggacggaccatcatcttctccatcaatcagcctcagtactccatcttcaaattttttgatagcctcaccttagtggcttcaggaaaagttatgtttcatggacctgcacaggatgctttggagtacttcagatctgcaggttacaattatgaatcccacaacaaccctgcagacttcttcctggatgtcattaatggaggtttctctaatatattagacacagaggaagacggccatgaagatgacaaatatgaagagctttttgagagacagtatcaagtcacaggaaaactggccaatatgtatgcccagtccccattatacagtgaaacaagagccatcctggatcaactcttgggagaacagaagctggagaggagctcagccgtggagacaacatgtgtcacccctttctgccatcagctcaagtggattatctgtcaatcattcaaaaatttcaagggttttccatgggtcactgtgattcaggccattatcacagtcatattggctacagccgtaggcactgctttccgtgtcctaaaaaatgattgtattgaagtccagatgagagctggcctactttacctgctcaccatcttccagtgtatcacaagtgtgtctgcaggggagctctttgtgattgacagggttcgctttctacatgagcacaccagtggatactacagagtgtcatcctatttctttgggaaattgctggctgagctaatacccaggaggcttttgccaagtactgtattttctctaataacatatgtcatagcaggagtaaaaatgagtatgaagtgtttcttcactatgatatgtaccatcatggtgctggcctattctgccagttccctgccattgtccataggagctggggagaatgcagtggctgttccaacactgcttgtgaccatctactttgtgttcatgctgtttttttcaggtctatcactatattctggaagcttcctgcctaagctctcatggattcagtactttagcattcctcattatggatttagggctctgctgcataatgaattcctgggacaaaacttttgtccagaacacaacacagaagaagtcagtagatgccataactatgttatatgtactggtgaagaattcttgatgatccagggcattgatctctcatcgtggggcttctgggagaatcacctggctttagtttgtacaatgattatcctcttaacaattacctatgtgcagttattacaggttaagaatattagaaatttttagttcctgggggaggaattttctacagttgtttaaatagatgtgattccaaacaatcctctgaacattaataattatactcgtggacaaatgccactgagaggatccctcttctgtgaactgtgtgaatgcagagacttatggctgctcacagtacaaggctaaggaacacgcaaatgtttatctc

SEQ ID NO: 3393 - protein, 688 aa, Mus musculus
HRGSKSSAEQKPEPLAPSKDPSCKSSCASSNLSPCIISQWKKEPPEMNNDPTVISMIERHLCDLPETNTSDLKTLTEEAVLSFHNISYQETVQSGFPLRKKAYVIERLSNISGIMKPQAIMGPQDGSRSLLLDVLAARRDPRGLSGDILINGKPRPANFKCTSGYVPQNDVVLGTVTVRDNLEFSAALRLPVTITRDEKRRRINEVLELLHLNKEQNIKPRSKELRKRTSIAMELVTEHPILFLDDPTTGLDLRTTTDVILVLRRMSKKGRTIIFSINQPQYSIFKFFDSLTLVASGKVMFHGPAQDALEYFRSAGYNYESHNNPADFFLDVINGGFSNILDTEEDGHEDDKYEELFERQYQVTGKLANMYAQSPKETRAILDQLLGEQKLERSSAVETTCVTPFCHQLKWIICQSFKNFKGFPWVTVIQAIITVILATAVGTAFRVLKNDCIEVQMRAGLLYLLTIFQCITSVSAGELFVIDRVRFLHEHTSGYYRVSSYFFGKLLAELIPRRLLPSTVFSLITYVIAGVKMSMKCFFTMICTIMVLAYSASSLPLSIGAGENAVAVPTLLVTIYFVFMLFFSGLSKGSFLPKLSWIQYFSIPHYGFRALLHNEFLGQNFCPEHNTEEVSRCHNYVICTGEEFLMIQGIDLSSWGFWENHLALVCTMIILLTITYVQLLQVKNIRNF

SEQ ID NO: 3394 - DNA, 86669 bp, Homo sapiens
tagcttaatctgcagagacaaatgttatatactctactgtactatctgactctgcaggttaattatcaatacgtagttttttttttttcactgcagtctaatttttagaagtgaactttataaccaaataaactttataaccaaatgaactttttttttttttgagaggaagcctagctctgtcaccagggtggagtgcagtggcgagatcccagctcactgcaacctctgcctcctgggttcaagcgattctcctgcctcagcctcctgagtagctgggactacaggcgcatgccaccatgctcagctaatttttgtatttttagtacagatggggtttcaccatgttggccaggatggtctcaatctcctaacctcatgatccacccgcttcagcctcccaaagcgctgggattacaggtgtgaaccactgcacctggccctaaataaactttataaccaaatgaattacttcttaattggtctcttgtctgctgtataaagcaaattacatgaaccaaggtgttctggctccagcatctgggctcttactacccccacaatcccctgccccctccccgatgctgtctctctctgtgtaaaacccaccttctcttcactttccatgtctaaaagactttgacgcctgctttttgacatttctcgtctctccaagattattgctatcttggtaacttctctgtttattttgatgatcatcccatcaccctagcttctgtgctctctgatctcaactccatctccaggataggcagaattctaaagatctccctctcccctaacccctacaattccagttcattccctggttatttcatcaagcactaatctaggtactgatctgaaggattttgaagttataactaaagtcctaagtcagatgactctaacatatcaagattgtaaaggtgggcctgatttaatcacataagccctttaaaaggcagaaagagcctgggcgcagtggctcatgcctataatcccagcacttttgggaggccaaggtgggtggatcacctgaggtcaggagttcgaaaccagcctggccaatatggtgaaacccccgtctctactaaaaataacaaaaattagctgggcatggtgacgcatgcctgtagtccagctactcgggaggttgaggcaggataattgcttgagcctgggaggcgaaggttgcagtgagccgagattgtgccactgtactccagcctgggcaacagggcgagactccatctcaaaaaaaaaaaaaaaaaaaaaggcagaagggacagttgggttcaaagtttgagaaggactcaaactgtgttgaaagtggaggggccacatgggaagaaatgcaggcagccaagaggagctgagggtgcccctggttgacattcagcaaggacacaggaaactcagtcttggaaccaaaaagaaatggattctgccaacaaccttactctgcttggttctttagagaagagtgtccagctaagagttcagctggctgacactttgacttggcctgttgataccctgagcaaagcctaacctagcctagacttctgacctccacaattgggagataataaatgggtattgttttaagacattaacttgatggtaatttgttactcaagcaatagaaaacaaatacacttcccttccatttccataacctcactctcgtgttcaaaccgtgggaccttatcaaaacctggaatgtgaatattaaatgccagtatcccactcagtgacctgatcctcctgtttcaacttttgccatctgcatgtgacccctccatgtactttctttctctctgtctattcctggcttcgctttcctatgatgatgaatcacttcactcacatgactcctttgcttcatctttctattgccttacccacccaacaaaaccgtaccctagaatttatctaaccctttaccttcacatctttgtgaatgagaaagccatgcccatttgcagctttcaaaccactgtttacagagtcccatcccaagtagtaggggccttggtgttgctgtgcgagctctatgtctcatattagtgttgggaggaaaaacttcctctgccaacttaggtccagtgcttgggggcctgtaaattaattggcaatagatggattaacaggagaatagacaaggtttatttacacttactcaggtgaagaggctctctgtacagttagggatgagaatttatatgccaataatatgggaaaagggaggaggagagaaagggttctatgggaaagcaaatatacttttgtggaaagacaaatgggcttttagggaaacaaatgatggtacgacaatttgtgattatgttcggttatgcaattcgtcattcaggtgcaagtggtctccttcctggcagtaaagtctccttactggcagtgaagctccccaagagggaatttatggcagcttcactctctgaaagctctggctttagtcaaataagggaagctccagaaaggcttctttctgtatctgctgtgtcttaaatgtttcagtttaaaatactcttcataccaactcagtgggtgccagtgggtccctccattagcatcctcttccatttccttggggccttgtggtgagcagaaaaatggcctctcaaaggtgtccatgtcttattccctagaatgtgaatgataggttactttagcaaaggagaattaaggttccagatgaaatgaagattgttaatctaatgattttctctctctcttttttttttttgagatggagtctcactctgttgcccaggctggagtgcagtggcacaatcttggctcaccacaacctccgcctcccgggttcaagcgattctcctgcctcagcctcccgagtagctgggactacaggcgcatgccaccatgcccgcttaatttttgtatttttagtagagacagtgtttcactatgttggccaggctggtcttgaactcctgacctcgtaatccacccgcctcggcctcccaaagtgctgagattataggcgtgagcctgcccagatgaatgaacctggcccaaataactttaaaatagggagattatcctggcttacccagtgggcctattgtaataacaatacttaaaggtggaagagggaggcagaagaaaatcaaagatgtgatgacagaagcagggtcacagggctgctatgctgctggctttgaagatggagaaagaggccaagagccaaggaatgcaggtggcctctacaagattgaaaaggttccagaaaggaacacagacctgctgacattttgattttagaccactagacccattttagacttctgacccatagaaatgtaatatacttgtgttgtcttaaaccactaagtttgtggctatttgttatggcagcaatagaaaacgaatagaagtctattcaaatattcatcatttttccaaatcccgaatcagccattcacacccataccctcagcacatccatcaacttcagagagaaagtatagttatgggccagatatttatttcaattttctctaattaaaacatttacctcggccagatgtggtggctcacacctataatcccagcactttgggagtccaaggcaggcagatcccttcgaggccaggagttcaagaccagctgaggcaacatggtgagaccccatctctactaaaaatacaaaagttagccaggcatggtgatgcatgcctgtaatcccagctacttgggaggctgaggcaggagaattgcttgaacccaggaggtggaggttgtggcgagctgagattgtgccactgcactccagcctgggcaacagagtgagactctgtctcaaaaacaaaaaacaacaacaacaaaaaatccatttacctccatgaggatacatccaacttccttcccttttgttacaattttttaaaaagtttctgtattagtctgttctcatgctgctaataaagacatacccgagactgggtaatttataaaggaaagaggttaattgactcacagttcagcctggctagggaggcctcaggaaacttacaatcatggcagaaggggaagcaaacacatccttcttcacatggcggcaggaaggagaagtgccgagcaaaaggggaaaagccccttatgaaaccatcagagcgcgtgagaactcactatcagaacagcagcataggaataattacccctgtgattcgattacctcccaccaggtccctcccgcaacacgtggggattatgggaagtacaattcaagatgggctgggagccgtagctcacgcctgtaatcctagtactttgggaggccgaggtggtggatcacctgaggtcaagagttcgagaccagcctggccaacatggcaaaaccctgtctctactaaaaatacaaaaattaccaggcatggtggcaagtgcttgtaatcccagctactcaggaggctgaggtagtagaatcgcttgaacccgcaaggcagaggttgcagtgagctgagatcacaccattgcactctagcctgggtgacagagcaagactccgtctcaaaaaaaaaaaaggtgagatttgggtagggacacagcaaaaccatatcaatttcctttttaaaaaaaatatataaaggcaattttataacttatttgatgtatttgatgctcagtggttagttctcatccacattgactatctgcagatttttgaaaatggtaacaagtatataggtaaccaggaatgtaacaaaatatagagcttgtttggtgattctttaccctcattacattttctgaacaactgcacacagatgcggtatggaacattccttattcctttggcccagacagctttgttgaacctggtattaacacacacatctggagttcccatctccttcatggcaaatttccggatctctctgagtgccccagggacacacttcttgaagcccactctatgaatgcgcttgtgaatgctgatggcttattcttgggtcactacctcgtttatggcagaatagcccttcttcttctcgccgcttttctttgcaggagccattctgcctggcccaatttggaaaagaagagcgtgagggattcttaagtttccttttcttttctaattctaattcctctggatcccatttcattatgcttcctaagggacctgacactaccaataaccctttctttctttatggcttgtcctcttggcatgcacacatgttctagtctgtctaattcaaaccaaatgaatattttctctgaaccctaagatagcctctagctatattcctttctctcaccttccttttatactgaaatctttaggaagagttttaaactgtttccattattttatttacaataactgtttgcaccattatagactgaactttctcttgccaaattagtcaaaggccctgatagctgtgagctgggctgtgggggaatactgtgcacatagcctctcttccactgttattttcttaacttggagtggtaatgaaaatagatatactcggactgaatacatctgttatatatgtaacccaaatgtccccaggcccatggtgaatcctgtctgaaacctgaccttgccagggaaaattgacaattctggagttcacctttggagtaagcactaagaaatgtagcatactggggccttaccagctctttgcaactggtgcacaggcattcagcaggagtctcaatatggggccttataaatactgggcagtgactcttgcctggtaaaataaaagaaaggtcctgtggtggagggcagagggcaatggcttggaaggctgtgagtcacttaacctttaaccttgtgcaaatcagtctcctttgcactggtgacttatctgtaaaatgaggaaagtcatctaacatctgacctaatgaggaaggtcctttttctctaaaattctatggctagctccaaaaacaatgctaacttacaagttaaaatgactcatttctatacagtgcaatacatttataaaatgctggctttaatctgaacttatcaaatagaatttgataaaatattaggatgaggttaggaactaataaaactttattttgaatttttatttgatttaccactgcctcccaatgtaactttagttagcaaataaaccgacctataaatatgaaacatcacaatctaaaatatttttaaaattagactaaaattaaggaaacttttttttagttttagtcctatttcaagtgaggactctattgtcatgtgtctttatatgtatattttatcagtttattttacttttaaaatccatttttcattataaaatttataattttctaaatttgttacataaaatttagaaaattacactaaaatacaagataaaagacattccatgttactacccagaacaaatgaacactttcctgctattttctttctttctctttttctttagagtggggtctcactctgatcatggctcgctgcagccttgaaccccggggctcaagcaatccttccacctcagccccccaaatagctaggtccacaggcatgtgccatcacatccagctaatttttaaaaaattgtttgtacaaatttacaagaaaaaaacaaacaaccccatcaaaaagtgggcgaaggacatgaacagacacttctcaaaagaagacatttatgcagccaaaaaacacatgaagaaatgctcatcatcactggccatcagagaaatgcaaatcaaaaccactatgagatatcatctcacaccagttagaatggcaatcattaaaaagtcaggaaacaacaggtgctggagaggatgtggagaaataggaacacttttacactgttggtgggactgtaaactagttcaaccattgtggaagtcggtgtggcgattcctcagggatctagaactagaaataccatttgacccagccatcccattactgggtatatacccaaaggactataaatcatgctgctataaagacacatgcacacgtatgtttattgcggcactattcacaatagcaaagacttggaaccaacccaaatgtccaacaatgatagactggattaagaaaatgtggcacatatacaccatggaatactatgcagccataaaaaatgatgagttcatgtcctttgtagggacatggatgaaattggaaaccatcattctcagtaaactatcgcaagaacaaaaaaccaaacaccgcatattctcactcataggtgggaattgaacaatgagatcacttggacacaggaaggggaatatcacactctggggactgtggtggggtcgggggaggggggagggatagcattgggagatatacctaatgctagatgacacgttagtgggtgcagcgcaccagcatggcacatgtatacatatgtaactaacctgcacaatgtgcacatgtaccctaaaacttagagtataataaaaaaaaaaaaattaaaaaaaaaaattgtttgtagagacaggggctccctgtgttgcctaggcttgtctcgaattcttgggctcaagcaatcctctggcctcctcccaaagtgctgggattacaggtgtaagccaccacacccagtgtaatttaaaatattttttttttgtagagatagggtctcagtatgttgcccaggctggtcttgaactcctgggctcaagcaattctttggcctctgcctcccaaagtgttgggattacaggagtgagctgtcactccttgcccagcaattttctacgtataggttttttttttttttttttttttttgagatggagtctcacgttgtcacccaggctagagtgcagtgacatgatcttggctcactgcagcctctgcctccctggctccagcaattctcctgcctcagcctcctgggtagctgggattacaggcatgagccaccatgcccggctaatttttgtatttttagtagagaagggtttcaccatgttggccaggctgctcttgaagtcctgatatcaggtgatccacctgcctcggcctcccaaagtactaggattacaggcgtgagccaccgtgcctggcctctatgtatagggttttgatttgtttttactttgcataattacagaatgctatattcaactaagtatccatttttaaaaatgtgcttcatatcagtttcgtgtgtgttttctccatttttgttcagtctcctcctgtagtgccttcagatcttgctggaaatgttttcattttttctggtatcataaaattttattcttttcacttatctgggtgagctaaaaagaaaattaaaataaaatttatttttcggagatttttcagtttttgcaaacagtcgttaacggccaggtctgaaaactttatcttaatttttttttttttcttgagacagagtctcactctgtggcccaggctggagtgcagtggtgggatctcgggtcatttgcaacctctgcctcctgtgttcaagcgcttcttgttccttagcctcgcgagtagctgggattacagcctcgccaccacacccagctaacttttgtatttttagtagaggcagggtttcaccatgttggccaggctggtctcgaactcctggcctcaagtgatctgcctgcgtcagcctcccaaagtgctgggattacaggcatgagccaccgtgctggccttaattttgtcttaaaatgaagtatgactaacatgtatttctatatgggcctttaagggtcttgaaactgacagaaattaattcaaaagaataattttacccaaatgtttgggcgcatcatgaatatataccttaaaattcttttaaaaagcatgcggtatggtatatttaaaattctttttaaaaaattatgtatagtcaattttcttatctaggcttcctagctaaaactttcctgcattgggtgaaccattaatagttattcctagtgttgatttaaacaacttaaatgatactatgatttttgtttgtaaatgcaaaccagaaaatatctgcatgcaggtactaatttcctagggtagatgcagcaggtagatgttgggatggctacactcactcacaaagcctgatggcccgtttcctgaacatgcgcaatcactttctagcctttccacaccatcggaatattgcacagaagtatgtcagtcacaggagtgtaaagaataacatttaaactatggtaatattttcattcagtaagtttctcccctttccttccttgggttagattcagtgcctgatttttttaggccctggggcgcaagcatccactttctcagaatcccattcaccagaaaccacccatttaacttgctctgggtgcgagcagcgcttgtgactgggcaacctgtgcgtcagcgtccccggtgcttcggcgctccggccagtgacggcgaccaaacccagctaggtcagacgaggtactgatcagcccaatgagcgcctggtgattctcgtagttaatcactctggttcattccgttcgatcccggaggcgggagtgtttggcttgtccctgcgtgtcacggcagggtgaccctagccccgagggagggcggtggtaccagtcctgctggcggctcagcgcggcaggacacgtgtgcgctttcagccgggtcgcagggcgcttatcgcggcccggcagtcggggccacgcctcacccccgcccgcgaaccccgacctggggaaacccggggcgctggggaggggccactgcgttcagctctggcggtccacagcccgaagcgcggcttaggaagttcgtgtcagcgctgcctgagctcgtcccctggatgtccgggtctccccaggcggccacccgccggctcccatcgtgacctccagccgcagcgcctcccacgccggccgccgcgcgaggggagcgctcgggcgcgccgggtgtggttgggggaaggggttgtgccgcgcgcgggctgcgtgctgtgcccactcaaaaggttccgggcgcgcaggagggaagaggcagtgcccgccactcccactgagattgagagacgcggcaaggaggcagcctgtggaggaactgggtaggatttaggaacgcaccgtgcacatgcttggtggtcttgttaagtggaaactgctgctttagagtttgtttggaaggtccgggtgactcatcccaacatttacatccttaattgttaaagcgctgcctccgagcgcacgcatcctgagatcctgagcctttggttaagaccgagctctattaagctgagtgagtaaattgtaaaaccagtttcgctgagagtgtgtgtctggaaaggttggtgggcgttgtgtatatatttgttagaaaatcggtaaccgttcaaacgagacgactgagttttttagcctttcgcagtttcatttgaaagtgggtatgcagtttaaaactgacagttcaaagtggtttttcagaaaatgatgccctggtgcaaactgattctgggtcccatagtgtgttaagtgtgggttggtaaaaactcttggcctttctccaaatgtatgaaattaaagttgatattggaaggataaaaacccactgagcacagaagttactataggtggaggaaacatttgttgatgttaatattttaaaggggttgaccaatataggaattggtcaatgacaattgggaataggtaaatgacaaattattggtcaatccctttaaagctttggatggtttgctaaagaattattgaactcccttttgtaattttctgtggatagttgagtgctcttactcccttctcagtcctagagatatcccctaaagcttggtttttaggaggatcttacagctctcttatcatttgaatgtcagctagtcataaataaatacaccagagtagtaaggaagagatgttttttattgatattctttacaaaacagtgctttcagagtacagctttgactggattgtatagatcttgatgagatcttgatgagaaaggtttcaacgacaaagatggcatgttaagtctaacattacccttccattataaacattgaaagatgttggttattttattatttattttataataacttttaattgtgaaataatttgagagttactgaaaatttgcaaaaaatagtacagagagttcccataatatcatgcataacaagggccaaaactaataacatgggcatgctactataatacaatgaactaaactacagactttatttggatttcacttgtctttccactgtcctttttctgcccaggatccaatcgatgatctcactttgcatttaactgctaaatatccttaattttctctgatctgtgacagttcctcagcctttcattgttttttcatggaccttgacactagtgaagaagacccggtcagttaatttgtagaatgcccctcaatttgtgtttgcttgatgtttagtgtcatgattagatgaatgttctgcattttggggaaaaatgtcacagaagtaaagtttccatctcagtatgtcatattgggtacatgatgtcaatacttttttttgagactgagtcttgctttattgcccagactggagtgcagtggcacgatctcagctcattgcaacctttgcctcccaggttctagcgattctcctgcctcagcctcctgagtagctgggattataggcgcctgccaccatgcccagataattttttgtatttttagtagagacaggtttcatgttggccaggctggtctcgaactcctgacctctagtgatcctcctgccttggcctcccaaagtgctgggattacaggcgtgagccactgtgccctagccgatacttcttattacctatgatgttaatctgtttgccagattccctttgtatttgagatcttgggagagaaacctgcactgccatttttccttaaacttttattcattaatttaagcatccatttgtggaacatgttgtttagcgggttttttttcctaatggttaaacaaaacccctattttcttccttctacattttttaattaaaattcccttctgtagggaagagttgacccttctctcctgttcattgattcagttatttgtatcagtatgggctcatggatatttgttttgttatatgggttataatccaatattatcagtatttaatttgctgctcaaattgttctggctttcaccactgggacctttttcaggttggcgcctgtgccactttgacatacacttgctttttctttttccttcttttttttttttttttttttttgagacggagtctttgtcgcccaggctggagtgcagtggcacgatctcggctcactgcaccctccgcctcccaggctcaagcgattcttgtgcctcagcctaccaagtagctgggattacaggtacgtagcaccacacttggctactttttgtattttttagtagagacggggttttccatgttggccaggctggtctcaaactcctggcctcaagtgatctgcccgcctcggcctcccaaagtgctgggattacaggtgtgagctatcatgcccggactctttttcttttttaatgcatttcttgatttctggcatcagagaatgctcaggcttattttgtattttccatgtcccaaccttggaatgatccatttctccaaggcactgtgattattttgctttagaatggtattagaagctaatatctggacactggatgttctattagagttacttctttttttttttgagatggagtcttgctccaggccagagtgcaatggtgggatctcagctgactgcaacctcctccgcttcctgggttcaagcaattctcctgcctcagcctcctgagtagcagggattacaggcatgtgccaccacgcccagctaatttttaatgtttttagtaaagacgaggttttgccatgttggccaggctggtctcgaactcctgactttgggtgatccacccgcctcggcctccccaagtgctgggaatacaggcatgagccaccgtgcccggcctagagttacttttgaactttttatgtataataaaaagtttgtgacttagcaaatgctaagtctgaaaagattggtgtcaggcctctgagcccaagctaagccatcatatcctctgtgacctacacttacacatccagatggctggttcctgccttaactgatgacattaccttgtgaaattcctccttctggctcatcctggctctgtactgcctcaaggcttcacagacagcccccattacttcagtcaaacccaaatttcttcctcatctgttacctatcttgtcataattcttcataaaaacacacgtgctctccctgccaatcgtgtctgactgatctctcaaaccccaacaccttctacaaaacaactcctttccttcctaggcatggttggatactttcgactttggatacctggtttcgccatcctaacaaagccattatataaactcacaaaaggaaacctagctgaccccatagatcctaaatcctttccccactcctctttccattccttcaagacagctttagagactgccccccaccctagctctccctgactcatcccaacccttttcattacacacagccgaagtgcagggctgtgcagtcagaattcttacacaaggaccaggatcgcgtcctgtagcctttttgtccaaacaacttgaccttactgttttagcctagccatcatgtctccgtgcagtggctgccgccgccctaatacttttagaggccctcaaaatcacaaactatgctcaactcactctctacagctctcataacttccaaaatctattttcttcctcacacctgacacatatactttctgctccccggctcctccagctatactcactctttgttgcgtctcccacaattaccattgttcctggcccagacttcaatccggcctcccacattattcctgataccacacctgacccccatgactatctctctgatccaccgggcattcaccccatttccgcatatttccttctttcctgttcctcaccctgaacacttggtttactgatggcagttccaccagtcctaattgccactcaccagcaaaggcaggctatgctatagtatcttccacatctatcattgaggctaccactctgcccccctccactaccgctcagcaagccgaactcattgcctgaagtcaagcccttgctcttgcaaagggactacacatcaatatttatactgactctaaatatgccttccatatcctgcaccactatgcaagaggtttcctcactacacaagggtcctctatcattaatgcttctttaataaaaacgcttctcaaagccgctttacttccaaaggaagctggagtcattcactgcaagggccatcaaaaaggtatcatatcccatcgctcaggacaatgcttatgctgataagttagctaaaaaagcaactagtgttccaacttctgtccctcagggtcagtttttcttcttcgcattggtcactcccacctactcccccactgaaacttccacctatcaatctcttcccacacaaagcaaatggttcttagaccaaggaaaatatctccttccagcctcacaggcccattctattctgtcatcatttcataacctcttccatgtaggttacaagccgctagcctgcctcttagaacatttcctttccatcgtggaaatctgtcctcaaggaaatcacttctcagtgttccatctgctattctactactcctcaggaatttctcatgccccctcccttccctacacatcaagctcggggttttgctcctgcccaggactggcaaattagctttactcacatgccccgagtcaggaaactaaaatacttcttggtctgggtagacactttcactggataggtagaggcctttcccacagggtctgagaaggccacgacggtcatatcttcccttctgtcagacataattccttggtttggccttcccacctctatacggttcaatagaggaccggcctttattagtcaaatcagccaagcagtttttcgggctcttggtattcagtgaaacatttatatcccttaccatcctcaatcttcaggaaaggtagaacggactactggtcttttaaaaacacacctcaccaagctcagccaccaacttaaaaaggactggataatacttttaccacttgcccttctcagaattcgggcctgtcttcggaatgcgacaaaatacagcccatttgagctcctgtatagatgctcctttttattaggccccagtctcattccagacaccagaccaacttggactgcgcccccaaaaacttgtcatccctactatcttctgtctagtcatactcctattcaccattctcaactactcatacatgccctgctcttgtttacactgccggtttacactgtttctccaagccaccacagctgatatctcctggtgctatccccaaaccgccactctcaactcttaaagtaaataaatcatctttgctggcagggctatgctgaacctccttaggcactctctaattggatgtcctgggtcctcccaattcttagtcctttaatacctgtttttctccttgtcttattccgttcttttttcaattcatacaaaattgtatccaggccatcaccaatacttatataggacaattgtttcttctaacaaccccacaatatcaccccttaccacaaaatcttccttcagcttaatctctcccactttaggttcccacgccgcccctaatcccacttgaagcagccctgagaaacatcacccattctctctccataccaccccccaaaaattttcaccaccccaacactttaccactattttgttttatttttcttattaatataagaagacaggaatgtcaggcctctgagcccaagctaagccatcatatcccctgtgacctgcacatatacatccagatggttggttcctgccttaactgatgacattccaccacaaaagaactgaaaatggcctgttcctgccttaactgatgacattaccttgtgaaattccttctcctggctcattctggctcaaaagctcccccgctgagcaccctgtgacgccccacccctgcccaccagagaacaaaccccctttaccctttacctacccaaatcttatgaaatggccccatccctatctccctttgctgactttcttttcggactcagcccgcctgcatccaggtgattaaaaagctttattgctcacacgaagcctgtttggtggtctcttcacacggacgcgagtgaaaattcatattgccttaaagtttaaacattatagaggacctgactgtatttgccaacttggattcagtctcttatgggaaagaagtaaaattggtagtatttagtaattttttaaagctcccatttttttctcaaatgaaaccctgccagtgcttccaaaacaaataatgcatatgtgagcttctatctattaggctctggtaagaaaccaggatcattttattagctgagtagcttaaactacatcctaatattataattttggtatctgttgattgaattcacagtgagaaaaggatttgagacccatatttatgttagtcatactagcaatgaagaagtactgtgtttatgatgagacattatttggtctgagatggtaactgtacccgtggattagagagaggatcccttgcaataattaatgagcccttctatgattttggagtacacacacattacatgctccttcttttatatctttgtatactggatcatgatgttttttattgtaggtctcagaattttgagaagtaatgccgctgctcacatttaattttctgttaataattctttttttttttttttgagatggagtctcactctgtcgcccaggctggagtgcagtggcgccatctcggctcactgcaagctccacctcccgggttcacgccattctcctgcctcagcctccccagcagctgggactaccggcgcccctccaccacgcccagctacttttttgtatttttagtagagatggggtttcaccgtgttagccaggatggtcttgatctcctgacctcgtgatccacctgcctcggcctcccaaagtgctgggattacaggcatgagccactgcacccagcctctgttcataatttttactgcaattccgatgattgaattataaactggaagggagcagggatattgatcttcatgtagttgacatgtactagactcacggagaacaaggactgggttgtaggcacaatgctgtgtggttttgggtaaatctaactcacactcaacttgattttgtttccccctggggacttaggatcccaaaatgttctaatgacccacctcactgctgctaatcttcccacagtgccaatttggtggagtcaaccttgcaaagggagaagagaaagggtgatgactttcccagagcttctgccgctgtcctccctatgtcttctagccccagtcactactccttttatttaaattcataggggcttctcagtcagtcccctcttaaatgtaaatgagttattcacttcctgtgggcctgaagctgaaccactgtcatttatttttgaccttgttttcccagtttgggcagtgtaagaggaggtcaggaaatggaattgtttggggcaggcgattttgcagaacatgcacagataataggtttcagggagctctcataggctatggagggaggggtgcaggacagtgtcctcatcttggctcttgatattattatggtggactcttatgtggtctccctgcattgtccctacccatgaccaaagtcagagtgatcctttaaaccaagcttgtccaacgtgcatgtggcccaagatggctttgaatgaagcccaacacaaattagtaaactttcttaaaacattatgtgatttttgtttttaatttagctcatcagctgttgttaatgttagtgtgttttatatgtggcccaagacaattcttcttccagtgtggcccagggaagccaaaagattggacactcctgctttaaatatagatatcatttcttcactcagaactttcctgtgccttccagtgccattcagatcaaagccaaagtccttcctgtggtcagtggtagatacaacccgagttcctgctctcttatcctccctcactctgcttcagcctcactggcctctttgctgttccttcgaccagcacttggacatatactgctcctccagaaggccaccctcagagctctgcttgagggcctcactggaaaggccttccgtgaccacctctgttgcccaggttggagtgcattggtgtgaccttggctcactgcaatctctgcctcccgggttcaagcaattcttgtgcctcagtctcccaagtagcaggaattacaggtatgcgccaccacacccggataatttttgtatgtttaatagagataaggatttcaccatattgtccaggctggtctccaaattccgggcctcaagcaatccacccacctcggcctcccaaagtgctgggattacaggcgtgagccaccatttctggcccacccttcctcttttgctttaattttttttctccgtagcactgttgactgatatttttcatatgtaacctcactgagggccgggatgtttatctgttgttttgttttgttcactcctgtaagtccagtgcctgccagataatagaagtctagtaaatatcgaattattattattattttttgagacagagtttcgctcttgttgcccagaatggagtgcaatggtgcgagctcagctcaccgcaacctctgcctcccaggttcaagcagttctcctgcctcagcctcccgagtggctggggttacaggcatgcgctaccatgcccaactaattttgtatttttagtagagacagggtttctccatgttggtcaggctggtctcgaactcccgacctcatgtgatccgcctgcctcggcctcccaaagtgctggcattacaggcatgaaccaccatgcccggccgaattaattttataggtgagaaacaggcttggagaggctaagcagtttctccagggttctgtggctaggaagtttaaggggagaaggagctgaaaccccacacattctgtgatggattggatagcattttatgggcagccttaggatttgaacatctccgttccctctgggaaactgctggccaaattgcagattagattaagaaaatttgggatgtaacacgcatgtaaattgcacttggtctaatttcatttatgatttgacgattttctagactgaagttttggctttctaatcacagattaaaaccaatttggacagaattcttttatttatttatttatttttatattttagagaaaggatcttgctctcacccagacgggagtatagtggcgtgatcttgactcactgcagcctggaactccctgggctcaagggatcccccttcctcagcctcacaagtagctaggtctacaggcatgtgccaccacacccggctaatttttcaattttattttttgtacagacgagcagaattcctgcagatttttgtgggaatgtaaatgaaaaaacagtagccttgtagggtcttatgttcatttgtttctattcaaagagaggatttagattaagctgaaaaattaaggggacagaaaactgattagtggttgtcaggggctctggtaaggagaggggatttctttgggttaacatgaatgatctgtcttgattgtagtggttacaggactgtgtacactttacaatgtcagaaaactgtgctcttaaaaaggatgaattttactgtttacaatactgtttcctgttgacgggtttccaataaacatgattaaaaaaaccaaagattaggcagaaccgtgtgtacagttggcataggatcccttccaaaacagtttttccttagtaataagtattaatttctgtaagttattaatttcctatagataccttgctggctttactgaaaatcttgtaggatcaggatatataggagtgaggagagggtagagctgggaccttgcagtcagggaccctccagaattccagggtcaagtcttagctcctgatcaggcacgctgcacccttttgatggtctttgcttacctttttagcctcattttgttactgcccccctctgaaaactaaactccagcctcatgaatggtatacatgacccaacatatctctttcgattaaggattttgcattcctttactagaacagctttttctcttctcctttcttcttttccatctacaggggtcccttggggtacagtggtccctttgggtgcatatacccaaatccctgcatactcaagtcccacaagcagccctgtggaaccagtgtataggcagagtcagccctctgtatacatgggtttggcattcttccatctgcgtataagtggaccatgtacttcaaacctgtgctgttcaagattcagctgtacttggtctgtcttctctaggaacttgcttctaaaccctcccacctcgcaggtcttgtgctccctcagggatggaactgtcttaatctctcagttatcaaaggaatgtgaggttgtagaaattcaggtggggaaggacattcctggctggaagtatgtcctgcattgaaacaggataattgtagtttttgtgaactacagctgtgttaatcatactgcgttcttagataggtttgcttcggatttgtgcttacctttcacaaatttcatgctcagtctattctgtatgtgtgtttttgctctctaaattttataggcagttcagtaatcttaccagaatctaaattctgtagaagagttgtcaaaatctactccttaacatggttagtgactttatcttgctagtgctaacatctttattaagctaccttgcaacagagtgtgacacattgatttaatctttcacttaataggaataattgagaacagagtctgaagaactctgcaggaaacaaaaatagttccctgcttttatgatagccagcctctgtagagaaattcagttttcaaatccaaatatgacttttagaaattgcagatttgcaaggaattctaaaggaaatactttcataaatatcatttttctgtgtacttagtgtaggatagacacaagggcaaagagcatgaagaagaagaaagttcatgctctgtgacccaagcttgcagaacgttttaatgctgaattgttaaagctgttatctaaatactggtatatattgctagagagtttaggtacgtttttttgagacagggtcttgtcatgttgcccaagctgatctcctgtgctcaagagatcctcctgcctcagcctcacagctggaatttcaggcacaatagtgccaggctctttgggactttcatagggaagcctgtgagggtgcctggaagagttcaatggattcttttagttttcttttttactttctttccttccttttctctcttcttttttcttttcttttcttttcctttcctttcctttacctttcttttctttctttctttctttctttctttctttccttttctttctctttcttctttctttctttttccttcctttctttctcctgttccctccctccctcccttcctccctcccttccttccttcttccttccttccttccttccttccttctttctcctttttctttgcttttctttctttttgacagggttacgctgttgcttaggctggattccagtggcacaatcacgattcactgcagcctccgtctcatggaccctcaagggatcctcccacctcagcctccccagtaggtgggatcacaggtgtggaccaccacgcctggctaaatttgctataaaaattaacaggttttagccaagcacggtgactcatgcctgtaatcccagcactttgggaggctgaggcaggtggatcacctgaggttgggagttcaagaccagcctggccaacatggtgaaaccccatctctactaaaaatacaaaaatcgccaagtgtggtggtgggcgcctgtagtcccagctacttgggaggctgatgcaggagaattgcttgaacctgggaggcagagcttgcagtgagccaagatccacaccactgcactacgtcctcggcaacagagtgagactctgtcttgaaaaaagaaaaaaaaaagcctcagtcatatggatttgtcctagactctgatttgtttatgaaactcccaccttacttatgtaaggaaactttttttttttggtcatattaacctgtctattgccagtttaatttctaggaacccagctagggaacccacaggggagatggaaaaggattttttcttctctaaagtaacatttaagaaaacctaacagcgatacgttgttgcaaactgaagacccaaggagggtgggcaggtttgtcatccatgagtcttggttggttctgatttaacaaaagttcatccctctcaaagccttaacctttgatgtccccactgtcattgcctctgttatccaagcatggctcccctggatttttgcagttacctccccgctagtccttgcttccacacttgcctctccctcctcctgttgttctccacacagcagagtgttcctttatttatttattgagacagggtcttgctctgttgcccaagctggagtgcagcagcacaatcttagcacactgcaatctctgccttctgaattcaagcgattctcctgccgtcccgagtagctgggatcaaaaatgcacaccaccacgcccggctaatttttgtatttttagtagagacggggtttcaccatgttggccagggtggtcttgaactcctgacctcaagtaatctgctcacctcagccttccaaagtgctgagattacaggcaagagccaccgcacctggcctggcccagagtgttcctttataaacatcattagggttgtgagcctttcctgattaaaaggcctcagtggcttctcactgaccatacagccctttggtgatggggtctcttcctgtctgtcgggaattaggccgcgttctccagatcactgtgctgccatgatgtggggtcctagagcacctagccagtttaactctgaaaccaccatacaagcaggctttgggcctgaatataatcaacactggacctctcaggacaaatctgtcaaatcggatataacatgaaagcccatggatcaaccttttaaaggcaataaaataccatgataccttttaaagacaagggacaatttatgtaagttaaacttcagattttgtgttccttttcctttccactgctaagtttgtagcaatcgcctgacagtgatttgattgctcaggattgttatcttttgagattaacctcagtaaacactttaaagaggtatgtaatttatgcagcatgccctatggctatgaggtagagtgcaactccatatactagcgtcatcctaggaaaaaaaaaaggaagagtagagtctggaattctcaacttgaggctatcttggcttctaccaacaaatgcagtagttccagctgggcaggtggcaggctgaagactttaggctctacctgtgcacttttttttttttcctcttctcagttttcattgtatgaaaatgttgttttgagttgcgcaatttgagctttccaattgtaaagagtgttctatacaattaagagtttgataaagagtaaaaaaattgagaaatacggtatctgtaatgcagattatcatttttataatagagtaccagcatatattgaagacaaatggttaaacttctcaaaaaagtaaaaatgtgctgggcgcagtggctcacacctataatcccagcacttttggaggccgacgtgggcggatcacctgaggtcaggagtttgaaaccagccttgaccaccatggtgaaacttcgtctctactaaaaatacaaaaattagttgggcgttgtggcatcggcctgtaatcccagctactagggagactgaggcaggagaatcacttgaacccgggaggcggaggttgcagtgagcctagatcatgccattgcactccagcctgggcaacaagagtgaaactccatctcaaaaaaaaaaaaaaaaaaaaaaagtaaaaatgtggccttgctagttaggaagcaacaagaaaggcgaggtatgaatgacataggtagaccagcacgaaagaggcagcagagctggggaaagaatctccatatgcaaatcccttctgtcttatttgaaagggctttttgagttggctaagatacataatcaggccaaataacatgaatcggctgggatcaggtaaagtgtaaagccatttgaaggcttcctttcacttaaggctttgcagggggtctaggacacagaaagagaaaaagaaatggattagccttagcaggtaatctgcaaataaggaaacggcaacaggtgggaggttgatttttgttgtagggacatctcgttgtgtgatgggtattttccttgatataaaaagatgatgctaatccaatgagatcagcacacatgtccagaaagcttctgaccatggggaaagactggtgtttgcttaaaggtagttgttacttttagagagttccctaaacccagaatactatattcattagagatcgggcactttgagatgagtctggtgctgagttggtatattttatttatttaatccttactatgttttttttcttagagtaagtgtattgctccatattggtgttagaattaaagtttgttttttttcctttctttttgatgtaacgtgcttcagcttgatggtgtgccttggttatacctgtctaatcacttggtttgtgactcatgaatgactaaggccctgtatctcccgaggaagattgttagaatcctagccaggaatgaaacagctcctgagtaatgtgaattacacatttaatcctatcacaggaaaggcaaactctttctctgcaggcacttctaagattgtgattgtatttataagtgttaccctctgtcttgtatgggcatgggtgatcactctttcttgggtactttagctctagttgttgccttttatttgtggaaacctcacaaaagtgtctttaaaatttccgtcttgagtcagtgagctatttaaattcaagcaataagttatttgatactcttaagaagtcttttcctcagtggctgaaggaacatcaaatggggatggcagtagaagaagtgattgctagtgttggaattggtgtattttggtttctgaatacatggggagatggtttaaaacctttttgaagtaaaggtgtgaagtccatacattacagttatctctagagatccctggggaattggttccaagactcccctcagacacccaaatccacatatgctcaagttcctgatataacatggcatagtatttgcatataatgtacacgcattgttccatatactttaaatcatctctagattacttgtaatacctaatacaatgtaaatgttatggtaatagttgtgatactatattgtataggaaataatgatgaaaaaattctgtatatgttgtgtacaggcacagccatccatttatatttatttttaaatattaatttttttgagatggggtattactctgttacccaggctagagtgcagtggcatgatctcggctcactgcaatctctgcctcctgggctcaagtgatcctcctgcctcagcctcccgagtagccgaaaccatgggtgtgcaccagcatactcggctacttttttgtatttttgatagagatggggtttcaccatgttgtgcaggctggcctcgaattcctgcgttcaagtgatctgcctgccttgacctcccaaagtgctgggactacaggtgtgaaccaccacgcctgtcctattttttaatattttcgatttgcgactggttgaatcttcagatgcagaactcaaggacagggctgctgactgtacttgtgccttctctttcactgcttcaagagaacagaattttggctaattattaccattcattgtgttcacagattaaaacccagccatgtaccttgaatttgctgggtgtcagtctttaaatggtttctacttttccagactccaaatgaatagacttgtaaatatgattatgtttctggattacagaaacagttattaggagataactttggtttttggcagttttattatgatatgcctagatttgtctttttttgtattcatcctctttggtgttcctagagtttcttcaatctgtggcttgatacctttgtcagttttggaaaatactggccagtatttcttcaaatactgattctgtctaagtacccattttgctgcattttcccttctctctcaggttgcctgttatgcgtatgacagacctttttcatcttatcccatatgtttgttatgctcttttatgtagttctcattctttttaattaggagattttttccccctttcatggtaataattttcatcattcataattttcatcctggatgttttctgtgtactagtcttccagttcactaaattctctttcctaatttgtgtctaaactaggaaagctgctgttaaactcatcgattgaattcttaatttttgtttgtttttgtagatctttgttccttggtgagagtctgtcttttaattttcttaaacacatcaatcttttgttttaatgtcaatgtctgttaactccagtctagattacttgtgggtctgtttccattttctcatttccggaacatcaggttctgttttttggcatgcctggcaattttaaaaatttttttcattatttttaaacttatgattcgtgaatcaggcagccttcagaatcacagcagattcagagagattcctgatgcctggcaattttttattgaaaatttggatgatatcttcatagagagtggatttaaccttcttctagcagtctgagcagatcgccatgattgagtagactggttttttggtttgtccacattcccagagcataatgcttttgggatctctttccagggctcctcctctgttaggcactcaacaccaacaaaattttgtctccctagtgctgacagactgctgaaatatctgctcagaaatagtagaggcttcagtaagccgactcatttcttctagcagcttcttcctgcttggtttgtctgagctgtgccccaggtgtgtacaatttttgtgtgcaaatacccaccttaagaggaaagggcacgcggaatgcagagtttgtttcagtgcttcagtcccgccattccgtgattttggttcctcatgtcctggccgctttggttgcttttatcagacagaactcttcaacagtttcttcttactttttttggtctacttttgtcgttgtgcttaggaggactgtttgggaacagcaactcaatcataggcagagagaaagttcgtcatggattactttgacttttaaaaattaaaactacatttattgaagttaacatttcaaacctgtttcacaagttgttaagctcatcttaaggtcttactcaaataaatcttttttgaggccttttgtaatttgtttaatgaaatagttcacattttattgatacatttaatattcttttttgttttaaatttttgctcaacttttggtttgatttacttaatgattttcgtacctaactttaaatctccctagaatttaaatatacttattaattaaggaaattattatgtaattgcaaacaattttggagtttaccttctttgctgattgaaggtgcataacaacttccgacataaagtctggagctataaattcagagaaatgtctcctgttcctgactgcttggctaagccccttttgataataatgatgctataaactccgcaattaaaaaaaatagagtttcttttttttccctttgtttttgagatggagtctcgctctatcgctcaggctggagtacagtggcacgatctctgctcaccgcaacctctgcctccctggttcaagccattctcctgcctcagcctcccaagtagctgggattacaggcacacgccaccacacctggctaacttttgtattattagtagagacagggtttcaccatgttggccaggctggtcttgaaaaaaaatacagagattctgatgatgagcatgtagtctgtccctgcacttgacttatatcataatatgcttttcaagccagacaagtctaaccctcatccatccttttcctgctttatcagttttttgtaattttcatactcttcctatttacttattaggacccatttacttattagggatgtatttgacatctaattggagtttatgcattccaagttgtgcctgtcttcccatttaggtttttaggatgttcttatcacaatggtatgggccattcattggaaatgaagctgctcattgccacacatttaaaaatggacttgttttaaatgtattgtcacctagtgtttgcaatctcatttatctggactatcaacttactattgcttttctgtctgcagaaagataaaaactctccagatgtcttccagtaatgtcgaagtttttatcccagtgtcacaaggaaacaccaatggcttccccgcgacagcttccaatgacctgaaggcatttactgaaggagctgtgttaagttttcataacatctgctatcgagtaaaactgaagagtggctttctaccttgtcgaaaaccagttgagaaagaaatattatcgaatatcaagtatgtacatgaacttgtaaaaagacagctttttaatttacctacagtgaacctcacaggttttggctatttccaagaaactggctatgaacatttttgtacaagtctttgcacagatatacagacacatgctttcatttgttttagctaaactaggagtgaaataattgggccacattttaggtatatgtttaactctcaaagtaactgccagacttttttaaaaaatgcaccacatgtggctggatatggtggctcatgcctgtaatcccagcactttgggaggccgaggcaggcagatcatgaagtcaagagatcgagaacatcctggccgacatagtgaaaccctgtctctactgaaaatacaaaaaattagctgggcgtggtggtgtgtacctgtgatcccagctacttgggaggctgaggcaggagtatggcttgaatctgggatatcaagtctgcagtgggcgatgattgtcccactgtacaaataggtggcaaagtgagagcctatcttaaaagaaaaagaaaaagcgtactttgtgagggtgcatttattttgcttattttatcttttaaagttagtagatgagtaacttgatgcactagaagtctcgtctgctcaaggcttcacacttttttttttttttttgagagggagtctcgctctatcacccaggctggagtgcagcagcacaatctcggctcactgcaacctccacctcccgggttcaagtgattctcctgcctcagcctcccgagtagctgggattacaggtgtgtgccaccatgcctggctaatttttgtatttttagtcaagatggggtttcaccatgttggccaggctggtcttgaactcctgacctcatgatccacccgcctcagcctcccaaagcactggggtgtgagccactgtgccaggccacgcatttttttttatggtcaaatggcatgcatttcagcaatagatgagttcatctttactgcatgaatagaactgtgttccttactaggctcataaaaatgcagtcagatcttgcaattctttcacattttagtggaaaggtcatcaggggttggtgtttttgctgctggcatttcctgtttaagtatccatgagaaaggcctttttggctgtagtatttccagtctttctcctatctgctggctccaactctaaatacagtttctggaggtagaggaagggctgctgtcatttatcttacttttgatttgtgtttgatagcagcatcaccattcagatagtcatctacattccaaaaaagctgatgagaattttgattttggtttttcctctggacattttgtaatttcacttctagaactaagtcactataacctgatttcctctgcagggggaagaagataaaaacagtctgaccatgagaatttaaaaagttgtgattcttctgacttaggacaaatctttctcttatgcttgtttgtctccatacccagcatttgagctttccctcaccaacgctgaagatcttatggaaaaaaaaattcattcccatagatatgtggatgtcctgttattttaagagaaattcattatactcttggaacatttttaattaataacttattttgaaatgatttcaaatttatttatttattttttagagatggagtcttgctgcatcacctaagctggagtgtggtgctgcaatcatagctcactctaagctccaactcctgggctcaagtgattctcccgcctcagcctctggagtagctagatgccacaatgcctggctaattaaaaattttctgtgtgtggagatggggtcttcctacgttgcccaggctggccttgaactcctgggcttaagcgatcctcccaccttggcctcccaaagcactggggttataagcatgagccactgcacctggcctgatgttaaatttaaacgtttcaggaacataacccttttcattcaggttctcagccaacatttcactgcatttgttctcatcactttgtctcttcatgttcccatggtcattactgttttttctgaaccgtgtgagtgcaggctgtccacatggtgcttccttctccttaactcctttgtgtgtgttcttgaaaaaacgaccctctcctatataaccactcagacattgtccaggaggagccaaggggaaatgtagccttgtaatgaaggtcgtggtaggtcctcagggccttgggtcaaccatgcccctcacatatttgactgccaccatatcctgtctcttcagtctcattcaacgtggtattttcttatctcatcccacccctggtgatgttaaaattgatcacttggtcatgttgatgtctgccaaacttggctataatgtcaccctttccccttggtaattgattagtgttatgaggagagataaactgacattattccagaactccattctacattaaacttcaccaacttcagtccccactggatgactcctgcctgagtcagccaccactatcatagtcgccaaacagtgattttctattatcattatctcttagtttgttttactaaaaggaaaaaccttcatctatcaccagtatagagtcagggatttgtattttattcaattaacgcattattatgttttaccttcatactcttattgttcctgatttggtgggagatctttcaaggtgggttcttccctctctccgtctctcattctttggatatatctcctcattcttattttattttattttattttattttattttattttattttattttattgagatggaggtttgctcttgttgcccaggctggagtgcagtggcatgatcttggctcactgcaacttccggctcctgggttcaagagattctcctgcctcagcctcctagctgggactacaggtgcccaccaccatgcccagctaattttttgtatcttagtaaagacggggtttcatcatattggccaggctggtctcaaactcctgacctcaggtgatccacctgccttggcctcccaaaatgtagggattacaggcataagccaccgtgcccagcctctttttgtaattaaacaaattttattagagacaaggtcttacgttgttgcccaggctggagtgcagtggcatgatcatagctcactgcagcctcaatctcttgggctcaagtgatcctatcacctcagcctcctgagtagctgggaccaccggcacatgccaccacttccagctaacttttaagttttttgtagagatagggtttcactatgtttcccaggcacatctcaaactcctgggctcaagtgtttctcccaccttgcctcattctttgaatatttgcttggcacagcgagcagttccagactcactgtgtacttaccctgcctcagacctagaatcagctgttgatttttatggaggagatatttacaaaaccaaaatctaggtgtttaaaatgctcattgctattgggatgtcattgtttctaggctttctcagtggagtgagacctagagaagatatgtatgtgtatacgtctacacacatacgcatacacatacatgcataactttttaaaaaactacctcccacgtgcaggtgcatacagatctggccaaagcgggcgggagaagagctgggggagcagtggtgaccattcccgcagcaccctgggagtttccatctttatgtttctatagctgtctttgtatatggattaaaacctatggcttctcattaatttctccaattctcatctgaaccctcaagattctgtctatatttccatgttagtaaaatttcaaaaagtgacaaatctagctctaattggctagagagggtgggagattgtttatattatggaataagaaaatcagcaagtacattaaggatgtacgttaaggatatacttcctaattttcctattccataatataaacaatctccccaccctccagctatctcttctcaacgttttttaaaaggtgaaaacatttttccttgtctttttagaagtaatcccatttataaaaatgcagaaatttatttattcaacaaattttgaatgcctgctagtgcaggacattgtgcaagatgctagtgacacaggtaaatcctcagttcagggaagccttaaagcctagtgggggattcagaacacactttcacgctgataaaaggattgattagaagacccaatgggagccccaaccctaaattggagggcccgggcgtggtgattgagaaagtgaagattttgtgtgtgtagggatgggagggtgggagggaggtgagcattgacctctcttgtccataaacaaaacaagaccaagggattaatcattatccactaaaatgtaatagaggtgacaggaaattttggggtaaattttattccctgtgttccaggttcatgttcagtggtttacaacaactgtgctgtatgtcatgggcaggagggtgtgagaggtggtagcaatgtggcatgctgttcttgttgacagacttttatagtgagggacactgacctgcatgcaaatgctgtaaagcaataaataagggtggggaatgcagtttcagggatgatagaagggtggagggtggggtgggcaggccagtgaattgtagaccatagactagaacagaggtcagcaggctgtttccataaagggcagatagtattaataaacattttcagctttgtgggccatgcgtctgtgttgcagctactcagctgtggtgtagcatgaaagcagccctaggtaatatgtaagggaatgagcacggccctgttccaacaaccctttgtctaagaaaactgctgatccctggactagaatgtaaactccacaagggctcagactttgtttttcgtttgtttgtttgttttgttctcaactctcccatgccctagaagaatatcttgtatgtacacagtaaatacttgatcattgtgttgagtggatggagttggaattagccactgctccaaatggaaactcttggcatttatgactggacattgttgttgttttctgtaatgccagggtttcatcccaaagtagtaagccaagctctttgtcttagaacattcatgttgaggtttgggttaatcatttaggattgcttggtctttatttgagtaggtattttagaaacctggaaagcttttctgacagtggagccttagtgaataacaagcttatggtgattttagaggcagttattagggagctgtttataaagaagatgcatcaagagctatagataaatgcaccttgaaaatttgcccaatcattagtatgttgttttacacatttagagggaagagtccactgaaagagtaagagatttttctgttagatcttgctcctggtttacctaactcccattgtctttgtgcagcgtttcactgagagataccccagttaatgagcaaagtgaaagctacatttcacccttgtacccaccagccattgtacaattgtgatagttcaagtacaacaggcagtaaatgctcagggagtcttgggtttaagcactgtggtgcagttgcttatcactcataattgtataggatcataggattggcctctgtgctaatcattatttgagaatgaaatagtctttggctttgaccttccatttggaatagatattactttctctgtggaatatattgtaacttacttatcaattctaaggagagaatgggcatagatacctgtgttttgaaaggaacaagccaggccccaccctgaagtctcctttcttcttcttttttttttttttctgagacggagtcttgctctgttgcccaggctggagtacaatgacgtgatctcggctcactgcaacctccacctcctgggttcaagtgattctcctgcctcagcctcccgagtagctgggattgcaggcacccaccaccgtgtctggctaatttttgtatttttagtagagacggggttttgccatgttggccaggctggtctagaactcctgacctcaagtgatccacccgcctcggcttcccgaagtgctgggattacaggcatgagccaccacacccggccaaattctcctttctccagttccttcacttatcattctacttgctatctttaggagaaaatcaaactatttgctgtcttcttgggtctcagcacagtcaacactgccataattttttccaccttccttctctatctgaatattcactaccctcagacatccactttgtttgaaacgtgcttatgtatgtaccacgtcttcatattcttaaaggatgaccctaccaaagtgatgtcttctccttctaaacttggaattttccagtgtatttatctgactcttaacaaggaagaaaatgatatatcttgaggatatatcttttacttttctaaatggattaaggctttttttttctttcggtcatgttttctttttatcctgaagtgctttatcccagcctcgatttctacttagatgtttcttgggctgattagattttagcagtgagaatacttctaccggtattccacaaattagcgacttattaattgtgtagaatttgactaggtagcaaatgtgaccacttgaagatacagtactgatcatcaaacagtactcagaacacgccatgtatttcgtttcacactgtgttaagagcagtaagtgtaacggagatgtttcacaagaatctgttagttatttcaaggaacgttaaatgttgaatgtcattttccagaaaatataaatgggttagagaataagtgaaaggaatttagaggaatctatgccatttttcttgtaggacttgaccagtgattaacatccattatatattacacatcaaatcaacaatcttttttttttttctttaagtagagacagtgtctccctatgttgcccaggctggtctcaaactcctggcctcaggcaatcctgctttggtctcccagagtgctgggattacaggcctgagccaccatgcatgacctgttttgtttgtttgttttctttaagagttggtttgtgcttgtgttctatttgtaatttcatcaaccttcattgagtatattcagtgcctaccctaaattaatagaacctgacttaaaatggaatagtaaatcagtctgtttttgtgtttacagtgggatcatgaaacctggtctcaacgccatcctgggacccacaggtggaggcaaatcttcgtgagtataagagagtataagtaagcgttttctgtgcacttttaatgtgcttttaaaagccacttttttttgtgtgcgagcaggtatttattgagcatttgcaacgcatgtcaggtctggttctaggtgctgtggataactgtagttgcgtggttttttcccaaagaccaggtagtcttattaggttagctttactaataggatttgataaggtgattgacatgtagcagttgaccatgttatcagctaatagggaggaaaaagaatgggagaatattaaaagtagggaaaggaagcagaagatgtaagtaaaggcatgagtcttagataaaagagcacattgcctgtgttagtacctccaaggtcagacagctggaagggccatttgggagatctgtacttgatcagccaatggtgtcttgctttatgttttggggctttattgtaatgtacaatgaaaagagaaaggtgagaatttttaaaagcataattttagttaaaccatagaatttcttgaccagttaattttctaactaaagtagaatttggattcaaagtagccatgagatatatagcatgtgttggagggaaaaaaaccccacaacatatatattctcttataggttattagacccacaacatatatgtcctcttataggttattagatgtcttagctgcaaggaaagatccaagtggattatctggagatgttctgataaatggagcaccgcgacctgccaatttcaaatgtaattcaggttacgtggtacaagtaagtattagtgggtttgcattttctgtttcctctgtttctatatgggtaagtgctttggctgatagttcaatgtgcttccagttgattatgtgacatggtcctagaactgacgttctttacagcagcttttcttaatttctcatagacacttatgtgaaaaggcagggagaatctggaatatggcccttgtaaggacagtgataccaattctagtttttgtatcatttctaaaatgatacatactactgttatccttttttgcctttccttcacctttcttttcccctagcttagaaagatattttggcaaatccttgtatgaagcagtttggaaatgtctgctggtagttaacataattacttgcattctatttgggtgtacagatagggggtgaaaaatgattatagcaggctttgcagacatctatggagttaactgtcatttgcagaactgcaggttcatcattagctagaactttaccttagttatgttatctttgtggattatgttatgtatactaaacagtcatggtcttagaaaagactcattatcattatgtctcattaaaatgctatttgccttaaggatgatgttgtgatgggcactctgacggtgagagaaaacttacagttctcagcagctcttcggcttgcaacaactatgacgaatcatgaaaaaaacgaacggattaacagggtcattcaagagttaggtctggataaagtggcagactccaaggtaatgtggaaaaactgaaagcatcatgatcagcataagtaggactttccctgtgtggataaaatgactctgattcagaagtttcctgtaatgtgtatggtcaaaaatggttgctttccataacaatgagaaaagtggcttgttacataatatgaacgtggaaattaacctggaaaaaaaatcttcacattggttgaattctgcacctgaagtgaggcaatgtggtgttgtacgtgaaagtgttcatcacctggcctttccttatgctcctcccccacctcatggtttaagtcacgtctcattccgtgtctgcactaacttttcttcttcctctttttctcttcctccttttagtcactcttcctccaagggactttgttccattgctattgaggtatatttctgggattgataagtgatgagagtccaaggattcttgctctgtatcagcagtccccaacttttgccaccagggaccagttttatggaagacagtttttctatggaccagggtaggggggatggttttgggataattcaagtgcattacatttattgtacactttatttctattattatttcattgtaatatataatgaaataattatacaactcatcataatatagaatcagtgggagccctaagcttgttttcctgcaactagatggtcccatttgggggtgatgggaaacggtgacacatcatcaggcattagattctcataaggaacacacaatttagatcctcgtacatgcagttcacaatagggttcatgctcctatgagaatctaatgccgccactgacctgacaggtggagctcaggtggtaatgcaagcattggggagcggctgtaaataccgatgaagctttgctcacttgcctgctgtgcatcctggttccccagaagttggggacccctgctctatatgtttcagtttcctataatttggcttccaaaattatatttggtcaaattaggatttatttctcatttatgtagtgtctgttttttttaatagcctttcttttaatagttttgtctctcattccctcccttctctgcctctttttcttctgccaaatgtttacagacttttgtatgctaagctgtcttttaggttctagagatacaattgtgggcaagagagacaaagtaactcctcctcttgtgggttggagaggatcgtgaagaaaaaaatgacatgaatgaatgaactttacaattgattaatatgtttggaagatttgctgagaagatatttgaagctttgggtgaaaatgagctttttgcattgtaatggctatagtgtaatcccctgtgatatcccttacttagaagcaatgaagaatgagatgttctaatggtgtatacttcatattatgctttctgacagtcctttctgttcagggtgttttactgtattttgtttggaagagtaactctgagatgccaccattcactacttatttccgctttatgagtgattgggttttctttgctttggttctgtttgattttatcttaccagtaaggtgttttgttccactctattctttaccttcaggcagccattgccctatgttgcttgttaggatatctagggaaaatagactgtgaaggcacagctattgacttcctagtttatttatctaaataattgaagcaatacatttaaaatatgttactttttgtgaaattttaaacataacagaaatgtagagtgaattgtctgattactatagtaatgatatggctatagtataattaatataataatgagacaattaatatcatttacatagatttcccagttattaaccttaggtatatatggggtcaatttggggagcctcatggtaattgaaaaggtgttaatatcatatgagagaaagtgaactctcctagctgcagagcccatgctcttattgtaagtccacctggaggctgggaggggagagagtgttagaagactaataattatagttgcattcacattttcttctcctgactttatctccctttttagactgtgatttcaccatgtcacctatcttttagtgttctgaacttcaaactacatatttgacttggtgaagaacaaactgttaaaagcaggtgctttttttaaaaaattttatctttcactaaagttctgggatacatgtgcagaacgtgcaggtttgttacatagtatacatgtgctatggtggtttgctgcacccttcaacccatcatctacattcggtatttctcctaatgctatcccatccctagcccctgacaccctgacaggccccagtgtgtgatgttccactccctgtgtccatgtgttctcattgttcaactcccacttatgagtgagaacatgcagtgtttcgttttctgttcctgtgttagtttgctgagaatgatggtttccagcttcatccatgtccctgcaaaggacatgaactcattcttttttatggctgcatagtattccatggtgtatatatgccacattttctttattcagtctatcattatgggcatttgggttggttccaagtctttgctattgtgaatagtgctgcaataaatacatgtgtgcatgtgtctttatagtagaatgatttataatcctttgcgtatatacccagtaatgggattgctgggtcaaatggtatttctggttctagatccttgaggaatcaccacactgtcttgcacaatggttgaactaatttacactcccatcaacagtgtaaaagcattcttatttctccacatcctctccagcatctgttgtttcctgactttttaatcatcgctattctaactggcatgagatggtatcttattgtggttttgatttgcatttctctaatgaccagtgatgatgaagtttttttcatatgtttgctggctacataaatgtcttcttttgagaagtgtctgttcatatcctttgcccaatttttgatggggttgtgtttttctcataaatttgtttaaggtctttgtagtttctggatattagccctttgtcagatagattgcaaaatttttctcccattctgtaggttgcctgttcactctgaagatagtttttttttttctttttttttttttgctgtgcagaagctctttagtgtaattagatcccatttgtcagttttggcttttgttgcaattgccttcagtgttttagtcatgaagtctttgcccatgcctatgtcctgaagggtattgcctaggttttcttctggggtttttacagttttaggtcttacatttaagtctttaatccatcttgagtagaggtgtaaggaagtggtccagtttcagttttctgcatatggctagccagttttcccagcaccatttattaaatacagaatcctttccccgttgcttgtttttgtcaggtatgtcaaagatcagatggttgtagatgtgtggcattatttctgaggcctctgttctgttccattggtctatatatctgttttggtaccagtaccatgctgttttggctactgtagccttgtagtatagtttaaagtcaggtcacgtgatgcctccagctttgttctttttgcataggattgtcttggctatacaggcttttttttgggttccatatgaaatttaaagtagttttttttctaattctgtgaagaaagtcaatggtagcttgatggagatagcattgaatctctatattactttgggcagtatggccattctcatgatattgattcttcctatccatgagcatgaaatgtttttccatttgtttgtgtactctcttatttcctttgtggtttgtagttctccttgaggaggtttttcacatcttttgtaagttgtattcctaggtattttattctctttgtaccaattgtgaatggaagttcatgatttggctctctgtttgtctattattggtgtataggaatgcttgtgatttttgcacattgattttgtatcctgagactttgctgaagttgcttatcagccttcagagattttgggctgagacaaggggcttatctaaatatacaatcatgtcatctgcaaacagagacaatttgacttcctctcttcctatttgaatacgctttatttctttctcttgcctgattgccctggccagaacttccaatattatgttgaataggagtggtgagagagtgcgtccttgtcttgtgccggttttcaaagggaatgcttccagcttttgcccattcagtatgatattggctgtgggtttgtcataaatagctcttattattttgagatacattccatcaatacctagtttattgagagtttttagcatgaaggggtgttgaattttatcgaaggccttactgcatctattgagttaatcatgtggttttcgtcatttgttctatttatgtgatggattacatttattgatttctatatgttgaagcagccttgcatcccagggatgaagctgacttgatcatggtggataaggtttttgatatgctgctggattcagtttgccagtagtttattgaggatattcacattgatgttgatcagggatattggcctgaaattttctttttttgttgtgtctctgccaggttttggtattagaatgatgctggcctcataaaatgagttagggagaagttcctctttttctattgtttggaatagtttcagaaggaatggtaccagctcctctttgtacctctggtagaattcggctgtgaatctgtctggtcctggaccttttttggttggtaggctattaattattgcctcaatttcagaacttgctattggtccactcagtgattcgacttcttcctggattagtcttgggagggtgtgtgtgtacaggaaaatccatttcttctagattttctagtttatttgcgtagaggtgtttatagtattctttgatggtagtttgtatttctgtgggatcagtgattatatcccctttatcattatttattgtgtctatttgattcttctctcttctttattagtctagcttgaggtctatgtattctgttaaacttttcaaaaaaccagccctggattcgttgatttgtttgaagggttttttcctgtctctatctccttcagttctgctctgatattagttatttcttgtcttctgctagctttttgaacttgtttgctattgcttctctagttcttttaattgtgatgttagggtgtcgattttacatctttcccactttctcctgtgggcatttagtgctataaatttccctctaaacactgctttagttatgtcccagagattctagtacgttgtgtctttgttctcattggtttcaaagaatttatttatttctgccttcatttcattatttatccaatagtcattcaggagcaggttgttcagtttccgtgtagttctacagttttttttttttttttttttttttttttgagacagagtcttgctctgttgcccaggctggagtgcagtggtgcagtctcagctcactgcaagctccacctcctgggttcacgccattcttctgcctcagcctcccaagtagctgggactacaggcttccaccacttagcccggctaattttttgtatttttattagagatggcatttcaccacgttagccaggatggtcttgatctcctgacctcatgatccgcctgcctcggcctcccaaagtgctgggattacaggcatgagccaccacgcccagtcatagttgtgcagttttgagtgagttttttttttttgagacagagtctcgctctgttgcccaggcttgaatgcagtggcgcgatcttggctcactgcaagttcagcctcccaggttcacaccattctcctgcctcagtctcctgagtagctgggactacaggtgcccgccaccacgcccagctaattttttgtatttttagtagagacggggtttcaccgtgttagccaggatggtcttgatctcctgacttcaagatccacctgcctcagccttccgaagtgctgggattacaggcatgagccaccacgcctggccttgagtgagtttcttaatcctgagttctaatttgattgcaatgtggtctgacagactgttggttatgatttccgttcttttgcatgtgatgaggagtgttttacttccaattatgtgataaattttagaataagtgctgtgtggtgctgagaagaatgtatattctattgctttggggtagagagttctgtaggtgtctgttaggttcacttggtccagagctgagttcaagtcctgaatatccttgttgatgtcgatgatctgtctaatattgacagtggggtgttaaaagtttcccactattattgtgtgggagtctgaagtctccttgtaggtctctaaggacttgctttatgagtctgcatgctcctgtattgggtgcatatagattttagatagttagctcttcttgttgaattgatctctttaccattatgtaatactcttctttctcttttttgatctttgttggttttaagtctgttttatcagagactgggattgcaacccctgctttttttgctttccatttgcttgacagatcttcctccatctctttattttgagcctatgtgtatctttcatgtgagatgggtctcctgaatacagcacaccgatgggtcttgactctttatccaatttgctagtctgtgtcttttaactggggcatttagcccatttacatttcaggttaatattgttatgtgtgaatttgatcctgtcattatgatgttagttggttattttgcccattaattgatgcagtttcttcatagtgttgatggtctttacaatttggtatgtttttgcagtcactggtaccagtttttccgttctatatttagtgcttccttgaggaactcttgaaaggcaggcctggtggtgacaaaatccctcagcacttgcttgtctgtaaaggaatttatttctccttcacttatgaagcttagtttggctggatatgaaattctgggtgaaaaattcttttctttaagaattttgaatattggtccccactctcttctgacttatagggtttctgcagagagatctgctgttagtctgataggcttccctttgttggtaacacaacctttctctctggctgcccttaacattttttccttcatttcaaccttcatgaatctgatgattatgtgtcttggggttgctcttgaggagtatctttgtgctgttctctttatttcctgaattagaatgttggcctgtcttgctaggttggggaagttcttctggataatatcctgaagaatgttttccaacttggttccattctccctgtcactttcaggtacaccaataaaacgtaggttttgtcctttcacatagtcccatatttcttgaaggctttgtttgttccttttcattcttttttctctaatcttgtcttcacgctttatttcattaagtttatttcattaatctcttatatcctttcttccgcttgattgattcagctattgatacttgtgtttgcttcacgaagttcttgtgctgtgtttttcagcttcatcaggtcatttatgttcttctataaactggttattctaattagcaattcctctatccttttttcagtgttcttagcttccttgcattgggttagaatatgcacctttagcttggaggagtttgttattacccaccttctgaagcctacttctgtctattcatcaaactcattctccatccagttttgttcccttgctggcgaggagctgtgatcctttggaggagaagaggcattctgcctttttgcacaggtttttcctcatcttcatagatttatctacctttggtctttgatgctggtgacctttggatggggttttggtgtggatttcctttttgttgatgttgatgctattcctttctgtttgttagttttccttctaacagtcaggcctctctgctgcaggtctgctggagtttgctgcaggtccactccagaccctgtttgcctgggtatcaccagcagaggctatagaacagcaaagataccccaaagattgctgcctgttttttttctctggaagctttgttcccagaggggcacccgccagatgccagctggagctctcctgtatgaagtgtctgtcgacccctgctgggaggtgtctcccaatcaggaggcacaggggtcaaggacccatttgaggaggcaatctgtcccttagcagagctctagcgctgtgctgggagattcactgctgtcttcaaagccagcaggcaggaacgtttaagtctgctgaagctgtgcccacagcctccccttacctcagctgctctgtcccagggaggtgggagttttatctatatacccctgactggggctgctgcctttctttcagagatgccctgcatagagaggaggaatctagagaggcagtctggctacagtggctttgccaagctgtggtcggctctacccagttcgaatttcccagaggctttgtttacactgtgagggcctactcaagcctcagtaatggtggatgcccctccccccaccaagctcaagcttcccaggttgactttagactgctgtgctggcagtaagaatttcaagccagtggatcttagcttgctgggctctgtggggctgggatccgctgagctaggctagaccacttggttccctggcttcagccccttttccaggggagtgaacagttttgtcgcgctggcattccaggcaccactggggtatgaaaaaaaaactcctgcagctgtctcagtgtctgcccaaatggccacccagttttgtgtttgaaacccagggccctggtgatgtaggcacctgcgggaatctcctggtctgcgggttgtgaataccatgggaaaagtacagtatgtgggccggaatacaccatccctcgtggcacagtccctcacggcttctcttggctaggggagggacttcccccaccccttgtgcttcctgggtgaggcatagcctcacccaaggaggtgctttgtatcaggcttagttactgaccagctgtgacctgaacctaagtttactcatctgataaaagagatacctactttttctaccaggtatccacttatttgctgttcagaataaatgaacttaatgagataaagtgtctcttacaggactggcacacgttaggagctcaccaaatgataatgactggttgttatcattgacaattataatatttgtgatttaggttggaactcagtttatccgtggtgtgtctggaggagaaagaaaaaggactagtataggaatggagcttatcactgatccttccatcttgttcttggatgagcctacaactggcttagactcaagcacagcaaatgctgtccttttgctcctgaaaaggtaaatgctctggaaacattattctttagttaatatcttatcactactatgtcccagatattcttggggcagggggttcagaaatgatcaaagtaatttcttcctcttctgttggagtgaaagtcagttaacaaatgaaaagcattatcaagaaaaacaaagcaggtaagaatgtagggaaggatgtctgtgatgagggtgtaggggggttgggcctgttttgctgctgtctctttagcttctttactcaacaccaacagacacacacatacacattttttctccctctctctgctctataacactgaacattttgtagttttctgagtagacctttttatttcacacctttttcatcttattcttccaccttcagtactttttctttttcttcttagcttcctcctgttgggccttttttactctacttatatcatcttcagactgggttgtgagtctcccattttgcttatgaggaatccttagcatcttctatttcatattgtactgaaattgttgacctactggcctgatcctctttgaggcagaatgtttttgtgtacactgctagcatacagtaagttcttagaaaatgttaaaattgaagtgactcttcacataaaatattttgaatagtaacagttttgaacagtgattttggcccttcttccacctgtgtattgttattataattattacaaatgttattacaattcaaggtgagatttgggtggggacacatatcattctgcccctggcccctccctcccaaatctcatgtcctcacattttaaaaccaatcatgccttcccaacagtctcccagagtcttaactcatttcatcattaactcaaaagttcacattctaaagtctcatctgagacagggcaagttccatccacctatgggcctgtaaaatcaaaagcaagttagtaacttcctagatacaataggagtacaggcattgggtaaatacacctgttccaaatgggagaaattggccaaaacgaaggggctacaggtcccacgcaagtccgaaatccaaaggggcagtcaaatcttaaagctctgaaattatcttctttgattccatatctcacgtccaagtcacactgatgcaagaggtgggctcccagggccttgggaggctctggccttgtggatttgcagggcacagccccttttgtggctgatttcacaggctggtattgagtgtctgtggcttttccagatgcacaattcaagctgttggtggatctaccattctggggtcttaaggatgatggccctcttctcactactgcactaagcagtgcctcagtgggggccctgtgtaggggctcccacccaacatttcccatctgcagtgccctagcagaggttctccatgagggctccacccctaaagttgacttttgcctggacatccaggtatttccatacatcctctgaaatctaggtgaagggcaggcctaacaccacatggaagccgccaactctctgttggtcccctttaaccatggctgaaacatagggtaccaagtctcgagactgtacaaagcagcaaggccctgggcctggcctaggaaaccattttttcctcctaggcctctgggcctgtgatgggaggagctgctgtaaagacgtctgacattccctggagacattttccccattgtcttggtgattaacatttggttccctattacttatgcaaatttctgtagcaggcttgaatttctcttcagaaaatgggtttttcttttttatcgcatcatcaggctgcaaattttctgagcttgtatgctccgcttcccttttaaacataagttccaatttcaaaccatatctttgtgaatgaataaaactgaatgcttttaacagcacccgagtcacctcttgaatgctttgttgcttagaaatttcttctaccagatgctctaaatcatctctctcaagttcatagttccacagatctctagggcaggggcaaaatgccaccagtctctttgctaaaacatagcaagagtcacttttattccagttcccaacaagttcctcatctccatctgagaccacctcaacctggacttcattgtccatatcactgtcagcatttcagccaaagccaatcaacaagtctctaggaggttccaaactttcccacatcttcctgtcttcttcttagccctccaaactgttccagcctctgcctgttacccagttccaaagtggcttccagatttttgggtatcttacagcagcatcctgctctaccagtaccaatttactgtattagtttgttctcacactgctaataaagacatacctgaggctgggtaatttataagggaaagaagtttcatggacttacagttgcacatggctggggagatctcacaattttcgtggaaggcaaagaagaaaaggcatgttgtacatggcagcaggcaagagagcttgtgcaggggaactcccatttataaaaccatcagatctcgtgagagtttttcagtaccacgagaacagtatgggggaacttcccccatgattcaattatctccacctggccccatccttgatatgtggggattgttacaattgaaggtgagatttgggtgggcacacagccaaaccttatcaacctgtaagtcataactcctgtgaaaaggtactttagcactattttggtcatggacttagaccagagattaaatcccagccttgcctcttactaactgtgatcccttggccagttgcttgatcctttaagacatatttataaaatgagggtaataataataatattggaactgcctcatgacaatattgtgaaaattgaaatgaagttatctctaaattatttagcaaagacatagtaagtactcagttatgttaattgcattattagggcagaagagtgaaaaccaatttttaaagagccagaagacctaaatgataagtcagaatgagatatatgaccattgttttaatatgcagtccatagttagttctcaaacttgtaaatacttgcagattacctgggttgcttcttaaaatatggattccctagacctactgccagagattctaattcaatgtctgggaagactgtcctagaatctgcatttttaataactattctagttgattctagattgtcaatacaacacactgaaaattcctattctgttttaataaaagcattgaatttaggtttgctaactatagctaaataatatgagatgaaaagttagtaagacaaagtcaggctgaactagagcaaacaatctaaaggcaagaatagagtattttactgagaaatacaagtttcagatatttaatgacttagtattgtctcacttttaacttaggatgtctaagcagggacgaacaatcatcttctccattcatcagcctcgatattccatcttcaagttgtttgatagcctcaccttattggcctcaggaagacttatgttccacgggcctgctcaggaggccttgggatactttgaatcagctggtatggttgacttttttatgctgtaaaatgcttcattaatagaatcctgaaggagagcaaagggggtctgcaggagtgctgtttggtctttgggtagacataccatgagaatctatcacttcaaaatgtgtttgttccatttggtgctagtatttttcttcatttttgtagcaccagcttgttatttaggtatctttcttgtcttatttcaatgtgcatgcatgtgtgtatttctactgggcctatattctgcttcctagttacagtgaccatttcttaaaagctcagtaattaatatgttggccttatagccatttattctgtcacttgaacatttttgggaaggcctaatatgattgtcttcttgaccatataacagatgaggccttaaaattttttccccttgcacatgttggtctgccttgatgagcactcatggaaatgctacttaattttgtttatttttatttttgagatggagtcttgctctattgcccaggctggagtgcagtgacgtgatcttggctcactgcaagctctgcctctcgggttcacaccattctcctgcctcagcctcctgagtagctgggactgcaggcgcccacaaccatgcccggctaatttttttgtatttttttagtagagacagggtttcaccctgttagccaggaggatggtcttgatctcctgaccttgtgatctgccacctcggcctcccaacgtgctgggattataggtgtgagccactgcacccagcaaattttatttaaggttttttttttttcttttgagataggatctcactgtgtcacccaggctggagtgcagtggcacaatcttgactcactgcagcctcaaccccccgcgctcaagccatcctcccacctcacccaagcagctgggactatagacacatgccaccatggctatctaatttttgtattttttgtagagtcggggtcttgccatgttgcccaggatggtctcaaactcctgagctaaagcaatctgctgtggcctcccaaagtgttgggattacaggtgtgagccactgtgaccggcagacactacttaattttctggtaactatagattgcagctttagcccttgagtgggtatcggtcaatagagtggttagtcctaaacctgacttagatgggccaaaatttctaacaatcttggacagcatggttctttttatttcaaattgaaatgtgtgatttttaaaattttagatagaaatgtgtgattttttttaatggcttgtgcggtctgcatcattttagatatatttggatatgattataaatgattccctatgatcctaaatataattttagatattcattggccatgtttcttaattaggttttaataaaggggatgaactaagagtcagacttcaggccacgctgagttcagatgatctcatcatccaaagctgaatggttcaggtgtgctgtgctggccatgttctatcgagaatactgctcaggggatttgttctctatttggaattacagcagcacagcagttgatttggatttctgaattaattaattaattaatttacctttgagacagagtctcactctgtcgcccaggctagagtgcagtggtgctttcagagctcactgcaacctccacctcccaggttcaagcaattcttgtgcctcagcctccttagtagctgggattatagtcataagccaatgcacctggctaatttttgtgtttttagtagagatggggttttgccatgttggctaggttggtctggaagtcctgggctcaagtggtttgctggtctcggcctcccgaagtgctagtattacagatgtgagccattgcacccagcgctggacctctgaatttagtatgtggggaagtagtcattgctaatgtgggttctatcattctggcattctgtcggtgaactcagagagcagaacacacctgggcttttggatttttttcttgggtctatatttagatttttgaggaagtactgttaagcaccagagcatactgatagctatttcaggtctcatgaattatgataggtaaggaccaagcactaatgcaaaatgccctgcaaatccaaggttggcttggagtgttttcttttctttctttttttttttttttttggcccagagacaaagaattgccgaaatattgtgtgataggctgggaacagtagctcatgcctgtaatcccagcactttgggaggccgaggcgggtggatcacttgaggccaggagttcgagaccagcctggccgacatggcaaagctgtgtctctactgaaaatacaaaaattagctggacgtggtcatgcgtgcttctaatcccagctacttgggaggctgaggcaggagaatcacttgaactcgggaggcagaggtttcagtgaaccaagattgccccaccacattccagcctgggtgacagagggagaccctgtctcaaaataaataaataaattatatatatatatatatatatatatagagagagagagagagagagagagacagagagagagagagactgaatatataaaaagaaagggtaaaattacgtgggaagaagagagaaagaaagttaaggaaaagtcattagattctgtcttctctagccttacctccctcaccctctgaaagtgagttctctttgttttccaagaccatcaagtttgtgtttttgagctgccttctttcataggttatcactgtgaggcctataataaccctgcagacttcttcttggacatcattaatggagattccactgctgtggcattaaacagagaagaagactttaaaggtatatgaatctgttacagtcccagatttttgcctaattgaattggctgaagtttagcaatgtggtggctaattaaaatgtggctttgtgaatttctgttgatgcagtcttctgataccagtcaacacaaatattttgttgtctgtgagtgctgttggtgtttttgattaatttataaatgagaatttatatggtgttgtcagttccaagaggagttaacattttaaaaaatgctcagtgtttatatagtgtttttaaaataagaaacttggcaatatatgcatttgcatatagtaggaagcaacaaccagatttttttttttttttttgagaaggaatctagctcttgtcacccaggctggagtgcaatggtgctatttcggctcactgacccctccgcctcccaggttcaagccactctcctgcctcagcttactgagcaactagaattacaagcctgtgccaccaggcccggctaattttcgtatatttagtagagatggagtttcaccatgttggccaggctggtttcaaactcctgacctcaagtgatcctcccgccttggcctcccaaagtgttgggattacaggtgtgagccaccgcccctggccacgaccagaattttatattaagaattagaactatatggtaagaagtctattttaaaagaattaaggtcaaatagaaaacgtcagtttgtttgctatattcataagactatggcaatagacaggctatttctctgtagttttctttttctttctttttctctttttaaatatacattttaatttattacttactttatttatttttatagagacagggtctcgtttcgttgctcaggctggtcttgaattcctggcctcgcatgatcctcctgcctctgccctgcaaaatactgggattacaggagtgagccactgtgcctggcctgttatacttttctaatgacagagctaataattttttatttctattttttcttttttgagatggagtcttgctctcttgcacaggctggagtgcagtggtgtgatctcagctcactgcaacctccacctccctggttcaagcgattctcttgcctcagcctcctgagtggctgggattacaggcacgcaccaccacgccaggctaattttttttgtattttcagtagagacagggtttcaccatgttggtcaggctggtctcgaactcctgacctcgtaatccacccgcctcagcctcccaaagtgctgagattacagtcatgagccgccgtgcctggcctattttttctttctaaagctttagaatgaaggtgttagggaagcatccaagaaagggttcacagaaaaaatgggctaaatttgttgttatcttgtttgtgtttcctttttatccactgattgcaaagccacagagatcatagagccttccaagcaggataagccactcatagaaaaattagcggagatttatgtcaactcctccttctacaaagagacaaaagctgaattacatcaactttccgggggtgagaagaagaagaagatcacagtcttcaaggagatcagctacaccacctccttctgtcatcaactcagatgggtttccaagcgttcattcaaaaacttgctgggtaatccccaggcctctatagctcaggtaaccagcagattcttttgaaatactcaaatgggaacaatgtggttctgttatcatctgcttcaggatatgtttatcttctacccacccttccaattatttgttatcttcactccacctgggatatagaaccagtcagcagaacaaataaaggacaattaagttttacttttggaaagcttccctttttttgagacagagtctcactctgttgcccaggctgcagtgtggtggcatgaactcagctcactgcagccctgacctccctgggctcaagtgatcctcacacctcagcctcttgaatagctgagactacaggcgtgtcccaccacgtccagctaatttttgtgttttgtgtagagatggggtttcgctgtgttgcccaggctggtcttgaactcgtgggttcaagcgattctcctgcctcagtctcccagagtgctaggattacaggtgtgagccaccacatctggccaggttcttttttttagtggtttcttagactacctaactcagaatttttgttgatttagacaagctgtaatgaataatctgagtagaaaaattttttttttgggaaattgtgaaagaagtgtcagccagttttggggttttctggtagctgttcacttttgttcactgattcattcaacttgttcttatagggcctgtgctgtgctttagggatgtgaattcagtagtgaacaaaatgggcaaaaataaaactctgctcatggagctaattttttgaggaagacagttatgataaataataaagaaattaaatagatagcatgttagatggtagaagaaactatggggaaagtttaagcagagaaggggtggagaaaggggaggaagagagagaagtagggagaagaaggttgatttgcagttggaatcaggtgatcagggaaaccttcacctactgtcactgaatacacctgaaagggagtatgtgctggccactccaagggaagagcctgtgtgcaaagtgctgttccttgtcatttaccttccttagacagtttacaggtgaaacaaacgtagtaagcaaatttgagttcacagaacaaggctattcattgttagattaactttctgttaatcaaaatgagataatgtttctttgttccttggttggctctgtgatagttggtgattattactccttgtggtttttgttattcttttctttacacatttttttttttttagagactgggtctcactctgtcactcatactggagtgcagtggtgcaatcatagctcactgcaaccccaaactcttggctcaagcgatcctcacacttcagcctcccgagtagctgtgactacagccgtgcaccacaacacctggctgattttttaattttttgtagaaacagggtctcactatgttgtcctggtctggatctcctgggctcaagcgatcctcctgccttggcctcccaaagtgctgggatcacaggtgtgagccaccatgcctggccttttctgttattcttaacccctctgtcacccaaaacattagtactcccagttcattggtccattcttcaaagaagtcaatttagctggttattttggggctgttatttttattaacaatattgagtttctgttgagtactaaaagatggcacattgttggctctagtaaaatattactgacgtttaaacttgtgcatcataatttctatacttaagtatatataaaatatatctaagagcttgtatccctagttaagccatactgctaattatgtatatatatgtatatatgtatagccacatatatgtatgtatagccatactgctagttaagtatatatataaatttatctaagagcttgtatccctagttgaaccatattgctaatttctccaaatgtttttggtacgtataatttggtgtttctgtcagaacactggcacttttatatactatcaattaaaggcaaaattttattctttgagcatagatttgatatcatttggaaatcagtctggtaggatcaacctgggttacttattgtcaacagtgaaataatgtaatgaattgcttttttagtgtgatgtatgcattagatttttcttacttggaaaataacttgaattatcttgcttcaaaaaatggtttataaatgtcttgtccaaatcgcctatgtggcaatactggagagggcataattagaacacagagctgtttttcacacactgagattctgcatgttttgatactgggcttccttccaatgctaacacctggcctagtgcctctaggtttagcttccctgcctcatcagtgaactcactttcacaaaaggaattccagccatgttcagagcagtggcagtctcttagattaagaataggaccttgtatctccctgagcatctgcttagcaggacaagttttgtttcgatttgtgaaaaactggaatattagcttagggcaggagtaggcaatatatattttttttttttgtaaaggatcaggtagtaaatattttaggctttgcagatcaggtggtgtttgtctcaggtagtcagctctaccgttttagtgtgaaagcagccaagctcataacatgaataaatgaacatggcagtattccaataataaacgaaaggctggctagatgcagtggttcctgcctataaccccagcactttgggagaccaaggcagaaggatgcttgaggccaagagtgtgagaacagcttgggcaataaagcaagaccccctttttttttctgagacagagtcatgctctgtcgcccaggctggagtgcagtggtgctgtgtcggctcactgtaacctccgcctcccgggttcaagcaattctcctgcctcagcctcccgagtagctgggactacgggtgcccgccaccatgcccagctaatttttgtatttttagtatagacagggtcgcaccatgttggccaggctggcttcgaactcctgacctcaggtgggtccacccgcttcagtcccccacagtgctgggattacagatgtgagccactgtgcctggccaagaccctatcttaaaaaaaaaggtaactttcattttattccaatgaaacattatacattggcactgaaatttgaattttatataaattttatattgtgagaaatattattattcttgactttttattcaatgataaataaaatgagctaagtgtggtggtgcatgtctgtagtcctaactactcaaaaggctgaggtgggaggattgcttgagaccagaagtttgaggctgcagtgaactatgattacaccactgcactccagcctgagtgacagagtgagactttgtctctaaaaaataataaaaaataaagtaaaaaaccattcttagctcataggtgaacaaagataggtggctggccctatttgacctgtgggctatagcttaatgattcctgattcagggtttatgattttgtatgttgttttaattctgagttcttgaaaattgagttgttaaaatgttttatgactctctactgataaatcttcaatctgttgctttacagctgcactttggcttgaactagttatttctttacatgattcaaacttggcctctgataatgcatcttccaaaggttgtatttggaaaatcttagaatgaatggattatctgtatgagaagattgcatgttcatttaaggtgccaagggttttctgaacagctcaacttggaagcagatggggtctgtgcactccattgtgcactgtttagtttgcctgtttgttttcctttctttaatgccagaaagaataacacagacacaccttataaaagcatgccaaggttacgggattgattattttgtcaatatgtttgaaagctgactttgaaaacatttttagaactttgaaacttttaggaaacatcttaatcataatactcagtgttagtataagataacaagtttgaatgaaaacttgacaaagcatttggaatgtttagtttgaaaagtctgggccgggcatggtggctcatgcatgtaatcccagtgctttgggaggccaaggcgggcagatcatgaggtcaggagttcgagaccagcctggccaacatagtgaaaccctgtgtctactaaaagtacaaaaaattagctgggcttggtggtgggcgcatgtaatcccagttgcttgggaggctgaggcaggagagttgcttgaacctgggagctggaggttacagtgagccgagatcgcgccattgcactccagccagggcaacagtgcgagactgtctcaaaaaaaaaaaaaaaaaatcctgaattgaatattcttaaaagttttactgtgtgaaaacgtagactcttgtatgcacattcatgcatgcctgttgatacagtcatctgcatttattttggaagcttggtctgttgaagtatattctgagggtaatgaaaatatgccagcataatggatttccccccaaaatttctaagtgaattttaaaagacagctcataagtagaaacattggaataatgttctttccagactaggttcttcacaaactagttatcacagatcatggtactgtttttgcagttcggtttgcttcatgccaaaagtgtccttgatcagttactttaaatcttgataccattagactgttgcagtattgagattttgtttttttaactttgaagattccaagatatggtaggatattttgtcttctttagattaccatttcttatttttttattcttatttatttatcaatttattttttgagacagtatcgctctgtcgcccaggctggagtgcagtggtatgatcttggctcgctgcaacctccacctctagggttcaagtgattcttgtgcctcagcctcccgagtagctgggactacaggcgtacaccaccatgcctggctaatttttttgtgtgtgttttttttttagtagagacggagtctcaccatgttgcccaggctggtctcaaactcctgagttcaggcaatctgccccctcggcctcccaaattgctgatattacaggcatgagccaccacgcccagcccatttcttgttttttaatatttaactcacgagtaaatataaataggattttctcagataaattatatcataacgtaacccttaaccctttgcttattgaagtgtccttaagagaccctttatcctagaaacaagagtggtgtttgtccagtctccttaggagctatagaaatcaattgagtggtgaagataggtgagaacagcaaagaattggcagcttaggtctgcagcattggctataggcctcactggctgaagcgatgaggaagcagtgacaggagatgggtagtggaagcatgcagtgtgtgcacagagaaagccggccaaatgctttggtgacagtgacaatgcacttttccagtgcaggcatggactccctagaggttggataggcaggctccatctcacccctatttcctcactgtgcaaaattccattgttagaatttttttaatgtgtgctttaaaatttttatttatttttaatgttaagaataaagatatcctgttttcactttaacctcttgaaatataaaatgactcatgttcattggcacaaaggttgagagttcagttcagggtcaaaactcttaggcacttggactttgctttgctacatacttgcattgctctgctatcctgtgtggtattcacaagctcagtaacctgaagcagaccctgaactgactgctgggtggtgcaatgggaggaagtccagcttttccagcagtgtgctttgtgtcctaccactctccccaaagcacagataacttaatttttaacttaggaagcagtctaaataatgtatgctgttttattttctcccagggacgttggccaagccattgagtgtttatcttaatggagagatctgattatgtaaccatatattatactaataaatggtgtgtataagtttttatctctaattgaaactcttcccctttttttgcatttttctttttgaaaagatcattgtcacagtcgtactgggactggttataggtgccatttactttgggctaaaaaatgattctactggaatccagaacaggtaagtaaatttggatcttgattttcagaaaatgctgttactttcttcaagcttattgaaatccattaagaatttgaatttaagacaagtatagtgtaaatgtcattcttttattgagggtaggatgagtcagtttatttttgagacagagtcatgctctgttgcccaggctggagtgcagtgacgcgatctcagctcactgcaatctccgcctcccgggttcaagcaattctcctgcctcagcttcccaagtagcctcgactacagacatccaccaccacgcccagctaatttttgtatttttagtagagacggggtcgcaccatgttggctagactggcttcgaactcctgacctcaggtgggtccacccaccttggcctcccaaagtgctgggattacaggcgtgagccactccacctggcccaattatttttaaatgtacagttcagtggcattaagtacatttacattgttatgcaactatcaccaccatccaactctagaattctttttgtcttctcaagtggaatatctgtacccattaagcaataacttcccatctcatatctgcctctcctaacccctggcagcaatcattctactttctgtctctgaacttgactactctaagaccctcatataagtggaatcatacagtagatattctttggtaactgactcatttcctttagcatgttgtctttatggctcattcatgtagcatgtgtcagatttctttccgttgtaaggttgaataatattccattgtatgtacataccacatttcgtttctccattcatctatagatggaaacttgggttgctttcaccttttggctgttgtaaacagtgctccctaggtgtacaaatatctctttcagccaggtgtggtggcatgtgtctgtagtcccagctactcgggaggctgaggtgggaggattgcttgagcccaggagttctaggttgcagtgagctatgattgcactactgcagtccagcctgggtgacagagttcgaccctgtctcttaaaaaaacaaacaaaaaaaaccctattttagttcctgctttcaattcttcggatatatacccagaattagaatttctgggtcatatagtaattctgttaatttttttgaggaactactataccgtcttccacagtggccgtaccattttacattcttaccagcagtgcacaagggttccagtttctccatatccttaccaacacttttctttttctcccttttaaatagtagagatccattggatctttggagaaatgtctattcaagtcctttgcccattttaaaattgaattgtttgtttttttgttgttgagttgtaggagtgctttatatttttgaggagatattaatcccttatcagatacataatttgcaaatatttttccccactctgtgggttgtcttttcagtattgatagtgtcctttgatgcataaacatttttaactttgatgtagtccaattgatcaatttcttcttttgttgcctgtgagctaatttctgtcactttttaaatatatatgtttgacttaggggtgtgatgggggtgggactcagcttttcctgttatatggttagcacttttgttagtgttgtgatccttacctagtttcagtcacagtggacccttaaaaacctcattttatgaggggactttttatcgactgtattgtgttctgaacataagcactcaggaatttcacagccctcagagttctggttatttcatgtatggagaacacttgtggcagatactgtgctccgtagtgcttgctgtccatagtctcaggttaccacccagtgatttagagggggtagatggtagtatccccattttactattgaggaaagttgaagacgcttatgtgcagcctattttgatgtctggaaaggctgattattttttaaagaataagcataaaagttggttcctcactcaagtaaaataaattcttttgtatggaatcagatagtgttactctacgatgagagtgttattaaacagcagtttaccagagtgatgtcattgttgtttttactttccctgagggctgaggtatctggattatttccagacttgctagtaattgatggtttgtgtgctgtgtagatgccatgtcttaacccagcacagaatatatcacaggatctaaaggcagtgggccttttatattgtgcagcaggaagcatttggaaaggacatggagtaacctggtcctcaactggaactttgaagaggactggaaatctggccattaaagctcttggtagaaaaatccagagaaataaagaagaactttaggtgtttcttcagatgttttctggagaaatagggcattaatcttattttaatttgtttgtttttgaaacagaatctcacaatattgcccaggctggtgtgcagtagtgcagtcatagctcactgcagctttgaactcctgggctcataatttgtatttgtgacttaagcttgctatcttttttttttttccccaaagctctagggtacatgtgcaggatgtgcaggtttgctacatagttaaacgtgtgccatggtggtttgctacacctatcaatccatcactttggtgttaagcccagtatgcattagctatttttcctgatgttcttcctcccactgcttctcgttgaccccagtatcattttttaaataagcatttggactatgttaaagtggcctgtgtatatgatttaatccctcctgggatgattagtgatttattgatgaggaaaaaatgtttcagcatcatctctggaaacaggttctcaaagttttgttcaggggtgaatattagtacttcataatttaaaactgctcgaggccagtggtttagttctcttctttggggatgaattctctgagagaggaaagcactctctgctctttctctaacccgtgtaactgagaaactgggttttaatcatatgtagagtataagcatctttgaattaatagctacctctggaataactgctttacagagttgtggtgatagctaaacaaattagtgtgtattaagggaaaaggtatactttaaaaacagtattcagatccagtcatctcacttctagatatttaccccaaagatgtgaaatcagtttattgaagaaatttctgcaccctcatatttattgcagcattgttcacaatagccaagatacggaatcacccgaagggtctgatttgataaagaaaatgtggtatatatacacagtggaaaaacaaaagaaattttgtcatttgcaacaacatggatggaattggagaatattatgccaagtgaaataagccaaacgcagaaagctaagcacagaaatgtcacataatctcacttaatgtggaatctgaaacaatggaactgaaagagacagtagaatggtggttgccagaggctagaggtgtgtggggaatggagagatgatggtcaaagggtacaaaacctcagttacacaggaggaataaggatttttctttggagatacattgcacaatgtggtgaacacagtaaataataatgtaaatttcagaattgctaaaatttaagatacttttaccacaaaaaataaatgtttgaggcgatggatgtgttaattagcttgatttaattatttcacacttatgattcatgaattatataacttggtaccccacaaatatatacaaccataatatgccaatttataatttaaaaaatcaaaataaaaaatattcagaccaataagtagatataacagatgtggattaccaccttgaaagaattagaatgaattaacttccttaataagaaaaaactgtgtttaaaataaatcatcttagtatttagaaggaacgtttccattgtctactttttcagaatcattatggacattactgtactgatagatttaagacaacaaattgaattgaatctttgctatgttccatgttctgaaattagctttttacttgatattaggtttatttgtgtacagaaagtgagataactgcatgtctaccaggcctggctatttttcactcattttaattatatgtacatacttttaaaactgctctggctgggcaccgtggcttacatttgtaactgcagcactttgggaggccaagctgggaggattgcttgaggccaggagttcaactcagttgcagtgagtttatgatcatgccactatactctagcctgggtgaccgagggcagctctgtctctaaaaataaaataaaacaaaaaagaccctagcctgttcccttagatctttgttctttaggtatctatggactcttttttttcttttaatgtaattgtgttgttcacttgggtttgcattttttaaaatgttctcttgtttttacgccatttaaatgatgtgtcacttacctctttttcagtttcaactcacacccttactgtcaattatattgttttgttatggtgtttcagggatgttggcatgctttcataaaatgcatatttgtatcaaagtgtagattaacttagcattttcctttttatttatttattttttaattttttttttttttgagacagtgtctcgctctgtcacccaggctggagtgcagtggcgcgatctcagctcactgcaacctccacgtcccaggttcaagcgattctcctgcctcagcctcctgagtagctgggactacaggcacctgccaccacgcccagctaatttttgtatttttagtagagacagggtttcaccatgttggttaggctggtcttgaactcctgacctcatgatcctcccgacccggcctcccatagtgccgagattacaggcatgagccactgcacccggccaacattttcctttttaaatctagttacttcactgagaaacaagcactaatagtgttccttttcattacgatacacaaattagatttttctttatcagtaagtgtcacttggtttcctctgagcactctggaaacctcatagagggctggctgtcttagcgtggtcaaggataatgtcacggccctgctgatggtagtgtggtgcatgtagattatgcatataataaggggttgattgaaggttcccttcactgtctttcattttgcttccacatgacttacattctttgttcaactttaaaatcaaagtggctaattgaatttcttaatctttacagactttatttagcttaccacttttctgtttgtacattaggaatggtacttggcatttttgttagttaaaattatgtattggcctggctgccataccaaaataccatagagcaagtggcttaaacaacagaaatgtattttctctcagttctagtctgaaagtctgagatcaggatgccagcattgctgggttctggtgagggccctctacctggcttgcagacttgcctccttgctgttccttgtgtggcagagcaagagctctggtgtctcttcctattaggacgctcttcccattacactctccccacctccctatcctgtaacctcatctgaacctaattaccttccaaagggcccatcttcaaataccatcacattgggggttggggcttcaacatatgaattttggtggggggagacgcaattcattccacaacaatccaagactgtgagtttcaaaatgagtaccactgtggagacataagagatggggagaggcttgatggggttcacgcttccctgttccaaccagaacagtttccctttttttcctgcttaactttatacactgtcatttgtggaaagagttttgtgggtagaaaatctgtctaagaatgctgagttgactgcggtgatttggttccccttttcatggcagagctggggttctcttcttcctgacgaccaaccagtgtttcagcagtgtttcagccgtggaactctttgtggtagagaagaagctcttcatgtgagtaggtctttgttctaggaacggggctgtccagcagcaggggctattggttagactgattacatctggggttggggccaaggatgggatccggaggattaccagtactttttaaaatttatttttaaattgatgaataaaaattgtatatattgatcatatacaacatgatgttttgaaaatatgtataggggttaccaatattcattgagaaaaagcagccagaggtagggaagaaaatcctgagcctttgggacctgatatccagagaaaagagtttttctagatttgagtacagtcagaaaatccaaatgttggagagagcaagcaataaagggactgaaaagtatattttgtttttagtaaatactgatgaccttcacaagaaaagtttgaggggcttggtagagattaagcagcaacttggaagtggggagattaagtcgacaaagaacgtgaccatgcttagccctcggtggaccagggaagtggcacgagccggaaggcattcttacagtaaagagcagcctggtttaatttattgtattttcctatttatttatttatttattttttggagacagggtcttgctttgtcgcccaggctggagtccagagacatgatcatggctcattgctgccttgacctgcggggcttacgcagtcctcccacctcggcctcctgagtaactgacatgcctagcttttttttttttttttgacatagagtctcgctcgctctgtctcccaggctggagtgcaatggtgcaatcttggctcactgcaatctctacctcccgggttcaagcgattctcctccctcagcctcccaagtagctgggattacaggtgcccgccaccacacccagctaatttttttggtatttttagtagagatggggtttcgccatgttggccaggctggtctcaaactcctgacctcaggtgatccaccccctttggccgcccaaagcactgggattacaggcgtgagccactgcaccggggcgcctggctattttttttttttttttaatttttttgtagagagaaggtctcactatgtttcccaggctgggtatttttcaaggatggatcacattttcccaaatgtacatgtcacatataggaattattagaaagggaaataatgaaggaagtggaagagtttggaattgtgggagaaagatgtcaggaagaggaaagattacaatttggtagttgacagggatgtatggctggaagacatgatcattgaaagaagaagtctttttctttttttaacttgggagtagaagaagtaagaagagcttagtcatctgaagctgcactagggggcttggagaataacaggccaccttcctcatcagaaatagggaaaaagaaaagcttctattcctgccaaaatcggctactgaagtgctgttcttcaaggaaagcccccgtcaaagaaggaaaagaagcattctttgaagagagggaggatgtgtggaatctgtttccctggactgagtgttcaggagctagaaagagcagcaataggagggaacagtgtcatgagaagaggggctgtgcgcagagcttcatgggatgctttctcagggaggctggcacccaaggtattcatgggcatgcatagtgggtctagccctgaggatgtgggaagctggcttgttcaacccctgctgtcagcagaggtctgtaacagacaagtctagcctgccctgtggcttcttaaactaatcttggatgtatgatacgtatttttgttctatagacatgaatacatcagcggatactacagagtgtcatcttatttccttggaaaactgttatctgatttattacccatgaggatgttaccaagtattatatttacctgtatagtgtacttcatgttaggtaagtatgtaacaaaacaaaaaaggacatgtctttagtcttgcctatgggtgaagtcagttgcaccttgcaagcatatttttggttctcaaaactataaaccaaaccatgagataaggaaacacctgtccattttgcactctctgaaacagttgttcactgtcagctatttttgtcaagactgtttcccaactgaacttttttgtttgtttgctttgtttcgcttttttgagacagggtcttgctctgtcacccaggctggagtgcagtggtgatcatatctcactgcagcctcaacctcctgggctccagtgatcctcctacctcagcctctgggtagctaggactaccggcacacagaaagatggagtttttggtaaagattgggtctcactgtgttgcccatgctggtcttatactcctggcctcaagtagtcctcctacctcagcctcccaaagtgctgggattataggaatgagcggatgtgcccagcctgaacttttaaaaccacttataaaactacactttactgagagatgcttgtgttatacacaaacatggaaagaatttataaaactttgagactatgctggagaagctgggatatttatagcctatctatgttttctatctgtctatctatctatctatctatctatctatctatctatctatctatctatctctccctgtctctctctatatatgtatatatatatacatacacacacttagagatatatagaatgattaaacatatttaatctcttagagatacataaaatgattaaatatatatatatgtatttatttaatatatattacccatccctgcttctttaatgagagaaagacggtgccttttggggcttgttaattaaaaaaaaaatacttgtttggtagatgtggagactcatttgtgcattatgctcaggcttcactccaggctccttgcatctgatttccatatatttcactgataaacacatgcacacacacaaaacccccggaaatatctattttgacactacaagataagaactaccgattgagtttaaaccttccatttgacaaataataggtgtgtcctaaacaatcagggttaggatctagatctccagactcctgattgttgttcttgtggctgtttcaaatcttcagattgtattacctgtagtattagctcactacagtttagaaagcagtttatgaaacgtaatttagtctcatttcaatccagagtgatgtggtgatctgtctggggaggcttgggttatggaggccccctccccctcccccagatactacaaccactgtgaggtcatggcatcccgatcgtcccagtcccttcactcacaaagttacagcacacaatgagtaatgtgaggatgtatgggcaaatgaatgtgctattgatgagtttcctgtgaaaagagaaggcagttgaattttggttagttgtactgcctgtagctcttcatctcaggaactcagaaattgtctgtaattatacataatggcacataagtgttataagagaactttatgcagttacatggacagacacaacattggagaccgagggtggttggagagtggatgactttttttcattctaatattagtttctcaaaatattagtgttaaatttgcacaataagcaatcccaaacatacggtgacctaggcagttgggttaactacttcttctctttctgactaaggattgaagccaaaggcagatgccttcttcgttatgatgtttacccttatgatggtggcttattcagccagttccatggcactggccatagcagcaggtcagagtgtggtttctgtagcaacacttctcatgaccatctgttttgtgtttatgatggtgagtctgaactgtgtttgctctgataaggaattgtttctttccttcatttcttcctgcacattcacttgtcatgtaaaacctgttttgaggattctgtaaatggggctctgctttacttaaggccatctactggaatagattatgttagagaatatactaactttcctctttgcccttatccaaccttttttgctactgttctaatgaagttccaataattttagttaatattgttactaatgagcttttaaaaggcgtttctttgtgacctattatgaaaccttaataaattggaatttcaaaaatcagaagacatttgatcggcagattctcttgagaattacagattatttgcccgactttcatgctggcattagagaactgctagtttattttttttttaacatttttaatttatgttttaaagttcccacatacagcattgaactgctagcttgtttacccaccagcagagatagtttggttggatttataatactgttttccaagacacatattaagcctcataagaagcagaacagagtatggtttgagtagtctattttggttccctctcgtattttgaaaaagagtgttttaaaaatattggaaaattgcagagttcacacactactaagtacctcctttctgggtttcgttcctgacattcaatatgtttctgcttatctttttttttttaatggttacttaatcctaatcttacatgcccctaaattttgcacatagaggaatcaacaggtgaatgaaaccagttacatttttttccccttcaacatcatacttgacaggaacatgtcctgtctgctagagtaggagtagatgcctttaaataaaaataattagcacaaactcttgccatagtttaattcttccatttctggatttgaaaactaccaatgcaaacattaatgaggaagtgataggcttgtttatatttcccatactgtcatccagcaaatacaaatgttttgtttgatttattattatttaaagatttctacacagaacattaaaaactagtcataaaactgtattttactcagagatgctgtgttatatgctaagcacttggtcaggtcaagtctgaatatatattgtcataccagcaacatcatcattgttatgcatataccagtatgcttgtggtggcaattagttctcttgtcaatcttcagcaggtcttcctggcatctccattgcgctattgctttttggcagctttaaatgatagcactgatcctgcttatgctctacctctcactacattatactctgtatcagttctagactttgggttatgttaagcctgcattcagaacctcatatccttgctaaagtcatatggatatagactgcaaacctttgtaaataacaaatcttatgtgaggtgcagtgggcatgtgacgctcaggatttatctggtatagattcttccaatgccaggtgtattggtgagcacacatagtggttgtgtcattagaatagtcagtgcttcttgaccttccattatttgcagttacaaataaagttgagtacatagtcttgacaattgaggatcttacgattaaatggaatatctaatatgtattagatattttgttcttcctttaaaaccgtaaatgacttcagctatatagagatgtgcacatgcagaggagaagagtttagtgagtgtcttgagtaagtggagagaacttcaagaaagagttggttttaaaagaaatacttacaaagtggtagggacttgaagagggtattctctagaattctgcatgaaattactcaagcaggcctgactcttagtatttgctttttgtagattttttcaggtctgttggtcaatctcacaaccattgcatcttggctgtcatggcttcagtacttcagcattccacgatatggatttacggtatgtcttccttgtctgtcactgtgactgcattcccaagctaggaacaatggaaatcaagtgtcctcatctcatttccctgaccatgagctgtgaaagtctcccatccagaaactcccttttaggagcaaggaatgagaatttcctgttagccttggttaacacaaggctggggagtcatttgctattttcctcagtcatcctttaaagggctaggggagatacctcctagtaaaggagaaagattggctaattgatgaaaaacacattgttgcatttcagttcaataaggaagtaaatgagaggatgggacactagaatacatatgtttataatgaaaggaaaattagaagagcaaagaccatataataagcatagtcatattggcttttgcaagctcattaactccaaagtaaactatctgtgtcttaatatagtataaccaagcttctaacatccaagaattacaactggttctaatgaaaacaaacaagaatgaaagattgtcactgtaaattaacaatactcattgagcaccactgtatcattttaattagaatgtttatggagttacaaaattggggagagaaggaggaaggagctatggtgtagtatagccagaggtctcccgctttggcaaaatactttacttcttttgtattggaagccaaaatcccaaccctaggtttcttgattgccagggaaaataacattagttggtttggtgagacaaagactgtgaatatgtttttagaaataacaataaagattaaactcagagggcatgattgtgataactctttggaaacttcttaaaatttaaaactgtttaccttgccctgctcccacttgtgttataggctttgcagcataatgaatttttgggacaaaacttctgcccaggactcaatgcaacaggaaacaatccttgtaactatgcaacgtaagtttttgttcagtgtcaaaatgggttttgttactaccatggtgtgatgtataaaggctactgggcttagatctgtatgagtccttccaggggcactgaatttttccgagcctacgttttctcatccataaagtgagttgtgcgcgaatgcatgtgaacatgtggcacaacccctcagtattctgctgcagtaaaaattgtctttaacatgcagcaatgtttcttacgtttgtttcttattgttttgggccttttaaaagatccttttgatattttgattgtgggtttgaattcttggttttcagagcatttgagattgaagtgaggtgctttgatattttatcaagggcttatggttcctgaactgtatggattatatgaaatctatgggtccctgaactcacggatacttctgagcccaacccacggacagtagtaagaatgaaataggcagcaatagcacaaagaaagtaaacatttccctgccaagatcctggcacttccactgcctcatgcatttggaagacatcatgaaatcaaaggccgcatagtcatgtgttgttgtttttaaattaacttggaatactccctatcaatcgatttatcctctaaaaaaacaagaaacacttgaataagttgagaaaaaaaccccgttttcacataatgttaaaacagattctaataacactggataatattgttttaagaatttagtaacacgtgccttttctatgattgctaatggtttgattttgatacataaattaatgagagaaaagagaatgttgatattatcctcaatctcctgaatgttcaagtagaatataaataattctgaataacaggacaaattactcttttgaattgtccacaggaaatcctctgtacagagaggttttctttattctgtccctctcttttggcttgatcagggtggtcaggatgaagtggatgggaaaaatgggaccagataaggaggaaccaccatgggcttcatggtaacggaagatgaggcttcatcctcagtagacaaaggaggaagatattcctttttttttttttttttttgaaatggagtctcgctctgtcaccgaggctggagtgcagtggcacgatgtccgctcactgcaagctccacctcccgggttgacgccattctcctgcctcagcctcctgagtagctgggattacaggcgcccaccaccacacctggctaattttttgtatttttagtagagatggagtttcaccatgttagccaggatggtctcgtctcctgacctcgtgatccacctgccttggcctcccaaagtgctgggattacaggcatgagccactgcagccggccaggaggaagctattcttatagtaaaagagaggctatgtatgtttttggaattgctgaattcccaagagttgcacaaaaatggtatcaggcagtaactgtggctgtccaaggtctttttagtacaagatgatttcctaacctgtggcaaggagttcatcctactctactctagctgccacttaaggcttaaacctgatagctgagtctgctgggaatgtcttgtacctgagtatctgtgatgctcctcacagtcttggtgcaagagctgacagaacatgactttggcaggaaacccatgcacacctcttttcctggttttggaattcttaacctgtgttgttttttatggctatttgtaagcgtaaagagtactgtaagagctttgatcatcttagtaagggtcacaggtgtcatctgtttaagcagatattttctttatcagggataagggaactattacttgataaatatttctgccctttggagagagcagcattacagatttggaaaccaataaatttgagtaggctaaaaacttggtgattcaaagtatgactctgtaaacctggtcaagttccttaaacgttagtcccctcatcttttaagtgtgtacaatgtctatcacattggattgttttaggaattaactaagttaggtccatgttgtttgttagtgtctagcaaaattgtaaacacacaatgactgttagctatgatatctgaaggggtaattattaaaggcttggttcaattttaggctcctttaaggaacagtggatatactgagtaacatttgacggatgctaggaatgaagttatattctttttctgtttaatttcagatgtactggcgaagaatatttggtaaagcagggcatcgatctctcaccctggggcttgtggaagaatcacgtggccttggcttgtatgattgttattttcctcacaattgcctacctgaaattgttatttcttaaaaaatattcttaaatttccccttaattcagtatgatttatcctcacataaaaaagaagcactttgattgaagtattcaatcaagtttttttgttgttttctgttcccttgccatcacactgttgcacagcagcaattgttttaaagagatacatttttagaaatcacaacaaactgaattaaacatgaaagaacccaagacatcatgtatcgcatattagttaatctcctcagacagtaaccatggggaagaaatctggtctaatttattaatctaaaaaaggagaattgaattctggaaactcctgacaagttattactgtctctggcatttgtttcctcatctttaaaatgaataggtaggttagtagcccttcagtcttaatactttatgatgctatggtttgccattatttaataaatgacaaatgtattaatgctatactggaaatgtaaaattgaaaatatgttggaaaaaagattctgtcttatagggtaaaaaaagccaccgtgatagaaaaaaaatctttttgataagcacattaaagttaatagaacttactgatattcctgtctagtggtataatatctcaggaatcttggctgagggtttggaactgtgggtagagtagagggccaggagtccagtaatagaattcttgcaccatttctggaacattctagctctgggaggtcacgtaaccttcttggggtagttcagtggtttagtggtttataatccaggtgtgcgtcagaatcatctgaggaactttgctaaaatacaaaaatctggcctaagtagctccagatctaccttcataaaggaatctgaccactcctggatttggtaatttccaagttctgaaaattttacttaggatttaataactattaacatctgtccctacataggttttctttcctacttatataccttatgttctcttcattctaaccttcatcagtaatagggaaatgttttaattttatttttttagttgaagggtaatgtaccaaaaaatatagttcagtgaattaaaatgaacacacatgtgcaaccatcaattcaggtcaagaaatagaagattgtagcacacaaaagcctactcagccattctcccagtcactacttccttccttacccctgggttatttttgaaatgacacttgatgtatttccctctgttgctgttatgagaacattgctacagccaagtgttgtgtttctgtgtgcataggttgatacttaattatctccccactttttaataaacttttaatttggaaataattttagattgacagaaaagttgcaaagatagtgaggaaagttcctgtctactctttgctcagcttcccttaatgttaacattttatatagcaagatgcatttgtcaaagctaacaagttaacattggtacaatcactgttaattaaactgcacacaatattcagatttcaccacttttccactaatattctttcattgttctaggattcaattcaggagaccacatttcatctagccctcttttttaaaagtaaatacttttcagcacttacaggagttaactgagctggggcatcatggtgtatagacgccctgacactggtcatcttggaattcatttagtttgtcagtgggtgccctgacattctgtcacaacatcaatttgggaacatggcattatatttttatctttgaacttttttctttttggatgacatttgattaatgcgtcatcttggaacacattatcttttttcttggttatgtgatcaggaagattaatcagtttttcctgttcttggtataattcctgcttttcacatacctgtcccttacagttctctatatatacccttcccttattacacagagagaaatatctatctatactttttacacaaaatatacttcaaaagaaacaaaacagccacaattattaactttttaaataaatgagaatttaattatatcctattttatgtattctttttttatattaaaattacctttatatgcttttgttgtggtaggaaccagataacataaaatttaccatcttaaccattttaaaattaaggactttttttttttttttttttttgagatagagtctcgctttgtcgcccaggctgtggtgcagtggcgcgatctcggctcactgcaagctccgcctcccgggttcatgccattctcctgcctcagcctgtaatggctgggactacaggctcccgctaccacgcccggctaattttttttttttgtatttttagtagagacagggtttcactgtgttagtcaggatggtctccatctcctgacctcgtgatccacccgcttcggcctcccaaagtgctgggattacaggcctgagccagcgcgcctggccaggaactttttttaaagtacggtttattttcttataaagtagaaatgtacttaaggatatagatatccatatatattatatgtaccctatatattatatatattctctgtatttttatatcctctctatatattatatcctatatataatttctatctatataattatatatataatgtatatataatttatatcttatatatgggtatgtatatccttaagtaaatttctactttataagaaaataaaccacactttaaaaaagttccttaattttaaaatggttaagatggtaaattttatgtgctcattttatgttttttatatatatatattcttttgattttattttcctggatgtcagaactaatctataatggagacgaattaatgtggtttaacataaaagaaatctcagttaaatgaatataagttgctatttatactgtttatactataaatgtatactatctatattgctttgcattctttagtggcaatatatactgttttatgatacctcactgtactgtgtctaaagaacttttcttttggatgtagcagtaggattataacaggtcattggcttgacaacacctgcaggtcattacagtgttttaaaaacttttgtctggtattcatagtaaaaaaaaaaatacttcatattgcagccctttttttgtgcatgcacaaaaatataatccaaacaagtttcttatggtgcattctgaaagatatttaaaaaataaggtttgagtaaatacatcttctatgtctatcaatatagacataaagcaaatatgcaatcaagaaatacatgttttcaaagttatgtaattatatccatctctttaattatttttagtgtcctggcttgatgatttttgtgcttatgctgggaatattgctctccctacctcacatggatatcaaaaggactaagtaattcttaatactttttttttcatttcatgttctttgttttcatagaaccttacattccccaaattcctttatgcatctgtaaaatgagagtttcttctacctttaaagttctgtgcatgcatggatatttacattaaattgtttttttttcaactaccttcaagaagagcagccagccaatttgactttttcaatgtccactaaatttctcagtgcaaccctataatttatttattttgatttattacaaaaatttgaattttctgtcatgcaaattcagactaaagttgctaagatcaaggaggggagggtagtcttttgttcaaaaagtcatctttccacctgtgcttctggttggtcttgtgtatttttttttttaagactttgttttggttggtggaggcaggacggaggagagttcattattcctgtaaaccaggggttgacaaactttctgagaagggcctgatactttctctctcagggtcttttttttgctatttgcctcttttaaaaaacaactttataaaaaaagttaaaaaccatttctcagcaatgtaaaaactctacttagcaggggggctgtacatcacagccaaggaacaccagatctggcccagaggccatcatttgcagagatacctcctgtagacagttgttcctgcttcatgtgagactgtgtcaatatgctaatatgctgataaaccaaagttctaagaaatttgttgtaattttaattttcaagatattatattgaaatcctgtttctccttaatagaacaaacacagtgcttcctgatacttcattctctcccctacctctctgccctgctttgacaaaaggcgaaaagtgggtttctgcatctggcattagtttcaaggttgttctgagtacactcagtcctgtgtggtggcagttagtgtggtaagaggggtaagagaggctgatatcagttgagatggaaccttctggcctcagggcttgtgggggagactgtctttttttttttttttttttttttcatgttcaggaattgtttgtttttgagacagagtctcactctgtctcaggctggagtgcagtggtgcgatcttggcttaccgcaacctcagcctcccaggttcaggtgattcccctgcctcagcctcctgagtagctgggactacaggtgtgtgccaccacgcctagctaatttttgtatttttagtaaagacgaggttacaccatgttggccaggctggtctcaaactcctggcctcaggtgatccacccacctcagcctcccaaagtgctgggattacaggtgttaagaccacacttggcctggaatttttctttttagtgcatccaaaagcgtggctattctctgagtaatcaattcacaccagtgatcccaccaaggatctgtaacccagagcaccaaattgctcattaaaatagtaaagtgttaatgtggacattatcttgttacattattgtctcaggtgtgaaactgagatcagagggttccttggtaaacacagaattgggatttaagaccaacgcaacaatgtctatgacatccatagggatttgtgtgtcaagctaacctgaatagttgctccagctcaccttcaccaagacaatgcaggagatagcagtgtcccacccttgtgggcttgtgtttatcttctgtggactaaagatcctggccttgaaccccaccagacatagctaccatgtggcttgcagcctgtttgtatacatactttaaataaatggttgacttgcatgttgacttgtagactacttttttccctccacttagcaatatgaacaaaatgatactctaaatcaaagtaactcttgttttctaaactataaaccttcaaatttctttctttccctcccttccttccttcctttctttttttcagcgtctcactctgttctttagtgcagtggctcagtcgcagctcactgcagcttcgatctcccaggctccagtgatcctcccacctcagcctcccgagtagctgggactataggtgcacgccaccacacctggctaatttttttgtagagacaaggtctcacttggttgcccaggctggcacatttctttgtgattacatagggtggaatttccagagcttgcctgataagaatcagtggtcatctagaatgcctataataggaaggaaagtattaccttttttctcccttgtgtcagaggtaagctggaaattctaggtaattctttgggaaatatagcacctacttaggattgcaataagaagttaaggctcactaacttccattgttataatttgatcttcattcaatcactgggtaactgttgcgttcaaagccatgcgttgtattttgtatccacctaaatatcagaagcacaagtagaactaagtgagcccattaacatcacctgatcttcagatcattttttagctgcagagtcatccttccacccctgagccccatagaacagcgtacagatggtcctcgacttacgatggcgttaccttccggtaaacccatattgtaagtcaaaaatacacttaatgcatcgaacctacagaatatgatagcttagcctagcctaaaaatgcgctcaggacactgacataccctgcagttcaaaatcccctaacacaaagccgattttatattaaagtgttgaatatctctgtaatctattgaatactgaaagtgaaaaacagaatgttggtatgatactcaaagtctagttctactgaatgtgcatggcttttgtaccattgcaaagttaaaaagccctaagtcaagccctcgcaattcggagaccatttgtatatgggcctctgctaaatgacacttggaagtggtgctgctttgatcaaagtgaggatgcgggctctcacttggctccctttgtcaggcaccaaattctgaagcatcagctcaatgatgagaggcttggcggtgtgctgtttggaaaacctcaagctgtttcatctttttcattttccaaatggggaaacctgtgtttcagactgcaaccggccagaggtcacacagattatttccttgataagatttggaaaatactgcagtattatcaggggcatcttgaccaatcctgaggtgggttactttggaaaatgccctatgcataagccagaatgggtgcagtgggtgtcagtggaagctaaggagttgtaagagctgtgaggcaaaaatggggcctttttatctctacagctaatctctaattcattgaatactgaatgtgaaaaagagaatggtggtatggtactcaaagtatggtactactgaatgcgtgtggctttcataccattgcaaagttgaaaagtcctaagtcaagcccaggcaagattccccagttctcctcctcttgtcatcctttacttaccaggtctgtaaccctgatggactagagagggtaatctataatgttcttacccacaaaatagggattctaatagtatctaccacgatcggggtatggaaattacataagatgctacatgtaaagtgcctagaagtacctggtcataggacctgctcaatacatttttagctattactgttatattccacaggacatgactggtcataagcatcatgctagtggcagttcatgggtgatgccctcagtggaaactgaggcaccatcctccagcatgtgttgtatggattgagccagagttcaacaaactggcttgccagccaaatctagcccactgtctgcttttgaaaatgcagctttattggaacacggccatgctcattcacctttgtagtgtttgtggctgtttttgccctatgatggcaaagtggttgcaccaaagaccattatgacctacaaagcctaaaatagttattatcggtcctgtgtgttaagtttgcagatccctacattaaacgagtagttcctgcctgcttccaacagttagaatacacaggtccatcaatcaagcaatattcgcttctctcaatatcattcccattaacccctctttagaatttacactcctgtttctgcagctttagactctgcccgtttagatgccctggacttaaaaagtaggaggacgtgtccaacctggaagtacagtgagggttccactgagtctgatactgcctgccacgtggtctctgggatttccacacctgtggaagagcaggcagagaaaggagatgtgtttgtcatcctgagaggctggggttactgctacataattgggcagagatttcacagagataactcagtgtttccatgctccacggctctgtaagggcaaggtaaccaagggctctgagccctcgagattgaaggttcagatcagcgcaccaggcaagcagcttagtacagttgaagtaccagccgacagcgagggagctcctggaaggacattagagggtgaagttattactacagctgtgtgaccagtggcaacaatggggactaggtagttccattcctatattgtgttacctagagattacagctggcctctccctcaaaaagtccagggtgtgcatgagtggatctgaatggtgcaaggggtggactgaagtagacactttcattgctgtctcctatctgattttggttgcagctctggtggacagttcatgtgagctcagatcttagcatcccacccctgcaccacacatctcttcactttctgctcctgggctttctccaaagctgaaagaagctcaccttgtgtgcaggtgtagcctggtaacatcccaggagcacccctcaaccagtagggattggggccagtgggcaaatgacccagccttagttcttcagacgggggcattctgtcatgttcccagaggaggagctgaggccctgctgcttaggaaacacaccggcgtcctggcatttcctccttttttgtgttactttgttccctactccagtttttgaatatcacctcccaaataaactatgaaatacttgaacccaaagtgcttgtcttatctcttctttcagagaaacacaaactaaaacacattctcattaagacgagaaataaacatgtctactttggctgcctctctctagcatggtactgtccttatttacagatgagatggtcttctacatagaaaacctaaagaaggccaggtgcggtggctcacgcctgctaatccagcactgtgagatgctgaggcaggaggatcacttgagacccggagtttgaggctgcagtgagctgtgatcaccactgcactccagcttgggcaacagagtgagaccctgtctctacaaaaaaagaaagaaaaagaaaagaaaacctaaagaaacacagaaccagagctagtaaaaaacttcaacaagtgtgctgaatataagattaatttatttaaaaattagtaaattaatttcctttataatagcaataaccaactagaaacaataatgaaagagaagattctgttcatcatagcaataaaaccataaaacagtaaagctatagtagcaataagaccattcatattaaacaatgcataagatctttaaggaattttaaaggtcttgacggaccttttaaaggacatgatggaagatctgaataaagggtgcattatcatgtttctgatattgtaaagatgtcaattctcctcaaaccaatatattcaacgcaattcaaattaaatttcaatgagacttttccctctttttcctctaaggaacccatcaaacttattttaacatttatatggaaaaaaatgattcacaaaaatagcttagtccgattttgcaaaacaaaaaataaacccagagaggcatcacctcaccacatctgaagacatactacaaagatatagtcatagaagtcattgtacaggaacaatcctagatcagcagaacgggataaagtgttcaaaaacaggcacatatatgcatgaatctgaaatatattgacatcatgagctactaaggtaaaacgacttttttaatagagtgttgataaaactggctcattatgtggacaaaaatacctacagaccttttatacaaatttaaaacattaaatgtgaaagataaaaccataagtttaataaataaaaattgtgtgacctcatggtctcttgaagacccccaaaacaatgcggcaaaaacattgatgaatttttctatgtaaaaatgagggaaacattggcaagttatcaggtggataagagatattaacagggtccaaactgataagggattaatatttaaacaatacaagaaacttgtaacaaacgataaaaagaccttgaccagcagagaaataggcaataaacagaaacatacttgtttcccattagatcgaattgcaagattttaaaggtttgataggtaatttacaaagagaaaccctaatgactaatgactagttgaggggatggatattcaactttattaggaatctaagatatgcaaaatgaggtctcacttttaaaacattccatctagcacagatgaagaagctaggtggtgccagtgctggtgaaagtatggctaaatccagttttctcatgtatgtagtggaatcgtaggctggtgcagtcattctggagggcaacctgatggttctgggtgagtatatgcctgggattcagcactccaacttctgttatatacccaccgagaaacttatgaaaagtcagtaagagaatttacaaagattctttttttttttttttgagacagagtctcactctgacacccaggctggagtgtagtgcagtggtgcaatcttggctcactccaacctctgcctcctgggttcaagcaatcctcctgcctcagcctcccgagcagctggaactacaggcatgcaccaccacgcctggctacttttttgtatttttagtagagatgggttttcgccatgttggccaggctggtcattaattcctggcctcaaatgatccacccacctcagcctcccaaagtgctaggattacaggcttgagccaccgtgaccagcccaaagattctgaaatagaattagggccaaccattcgctatagtaatagatactatgtcaaatgtggctgcatgctaggaagtgctacacaatcaacagggtaacttactagagctgcacactgcagaagaaatacaccttaataaaagcattgtaagaaaaagaaaggtctatagtatacatctatttatttaaacacataaacaggatttatttttctacatatccagaattatcagaatgggccc

SEQ ID NO: 3395 - DNA, 2631 bp, Homo sapiens
aagaggcagtgcccgccactcccactgagattgagagacgcggcaaggaggcagcctgtggaggaactggaaagataaaaactctccagatgtcttccagtaatgtcgaagtttttatcccagtgtcacaaggaaacaccaatggcttccccgcgacagcttccaatgacctgaaggcatttactgaaggagctgtgttaagttttcataacatctgctatcgagtaaaactgaagagtggctttctaccttgtcgaaaaccagttgagaaagaaatattatcgaatatcaatgggatcatgaaacctggtctcaacgccatcctgggacccacaggtggaggcaaatcttcgttattagatgtcttagctgcaaggaaagatccaagtggattatctggagatgttctgataaatggagcaccgcgacctgccaatttcaaatgtaattcaggttacgtggtacaagatgatgttgtgatgggcactctgacggtgagagaaaacttacagttctcagcagctcttcggcttgcaacaactatgacgaatcatgaaaaaaacgaacggattaacagggtcattcaagagttaggtctggataaagtggcagactccaaggttggaactcagtttatccgtggtgtgtctggaggagaaagaaaaaggactagtataggaatggagcttatcactgatccttccatcttgttcttggatgagcctacaactggcttagactcaagcacagcaaatgctgtccttttgctcctgaaaaggatgtctaagcagggacgaacaatcatcttctccattcatcagcctcgatattccatcttcaagttgtttgatagcctcaccttattggcctcaggaagacttatgttccacgggcctgctcaggaggccttgggatactttgaatcagctggttatcactgtgaggcctataataaccctgcagacttcttcttggacatcattaatggagattccactgctgtggcattaaacagagaagaagactttaaagccacagagatcatagagccttccaagcaggataagccactcatagaaaaattagcggagatttatgtcaactcctccttctacaaagagacaaaagctgaattacatcaactttccgggggtgagaagaagaagaagatcacagtcttcaaggagatcagctacaccacctccttctgtcatcaactcagatgggtttccaagcgttcattcaaaaacttgctgggtaatccccaggcctctatagctcagatcattgtcacagtcgtactgggactggttataggtgccatttactttgggctaaaaaatgattctactggaatccagaacagagctggggttctcttcttcctgacgaccaaccagtgtttcagcagtgtttcagccgtggaactctttgtggtagagaagaagctcttcatacatgaatacatcagcggatactacagagtgtcatcttatttccttggaaaactgttatctgatttattacccatgaggatgttaccaagtattatatttacctgtatagtgtacttcatgttaggattgaagccaaaggcagatgccttcttcgttatgatgtttacccttatgatggtggcttattcagccagttccatggcactggccatagcagcaggtcagagtgtggtttctgtagcaacacttctcatgaccatctgttttgtgtttatgatgattttttcaggtctgttggtcaatctcacaaccattgcatcttggctgtcatggcttcagtacttcagcattccacgatatggatttacggctttgcagcataatgaatttttgggacaaaacttctgcccaggactcaatgcaacaggaaacaatccttgtaactatgcaacatgtactggcgaagaatatttggtaaagcagggcatcgatctctcaccctggggcttgtggaagaatcacgtggccttggcttgtatgattgttattttcctcacaattgcctacctgaaattgttatttcttaaaaaatattcttaaatttccccttaattcagtatgatttatcctcacataaaaaagaagcactttgattgaagtattcaatcaagtttttttgttgttttctgttcccttgccatcacactgttgcacagcagcaattgttttaaagagatacatttttagaaatcacaacaaactgaattaaacatgaaagaacccaagacatcatgtatcgcatattagttaatctcctcagacagtaaccatggggaagaaatctggtctaatttattaatctaaaaaaggagaattgaattctggaaactcctgacaagttattactgtctctggcatttgtttcctcatctttaaaatgaataggtaggttagtagcccttcagtcttaatactttatgatgctatggtttgccattatttaataaatgacaaatgtattaatgctatactggaaatgtaaaattgaaaatatgttggaaaaaagattctgtcttatagggtaaaaaaagccaccgtgatagaaaaaaaatctttttgataagcacattaaagttaatagaacttactgatattcctgtctagtggtataata

SEQ ID NO: 3396 - protein, 643 aa, Homo sapiens
MSSSNVEVFIPVSQGNTNGFPATNDLKAFTEGAVLSFHNICYRVKLKSGFLPCRKPVEKEILSNINGIMKPQAILGPTGGGKSSLLDVLAARKDPSGLSGDVLINGAPRPANFKCNSGYVVQDDVVMGTLTVRENLQFSAALRLATTMTNHEKNERINRVIQELGLDKVADSKVGTQFIRGVSGGERKRTSIGMELITDPSILFLDEPTTGLDSSTANAVLLLLKRMSKQGRTIIFSIHQPRYSIFKLFDSLTLLASGRLMFHGPAQEALGYFESAGYHCEAYNNPADFFLDIINGDSTAVNREEDFKATEIIEPSKQDKPLIEKLAEIYVNSSFYKETKAELHQLSGGEKKKKITVFKEISYTTSFCHQLRWVSKRSFKNLLGNPQASIAQIIVTVVLGLVIGAIYFGLKNDSTGIQNRAGVLFFLTTNQCFSSVSAVELFVVEKKLFIHEYISGYYRVSSYFLGKLLSDLLPMRMLPSIIFTCIVYFMLGLKPKADAFFVMMFTLMMVAYSASSMAIAAGQSVVSVATLLMTICFVFMMIFSGLLVNLTTIASWLSWLQYFSIPRYGFTALQHNEFLGQNFCPQATGNNPCNYATCTGEEYLVKQGIDLSPWGLWKNHVACMIVIFLTIAYLKLLFLKKYS

SEQ ID NO: 3397 - DNA, 2806 bp, Homo sapiens
cactcccactgagattgagagacgcggcaaggaggcagcctgtggaggaactgggtaggatttaggaacgcaccgtgcacatgcttggtggtcttgttaagtggaaactgctgctttagagtttgtttggaaggtccgggtgactcatcccaacatttacatccttaattgttaaagcgctgcctccgagcgcacgcatcctgagatcctgagcctttggttaagaccgagctctattaagctgaaaagataaaaactctccagatgtcttccagtaatgtcgaagtttttatcccagtgtcacaaggaaacaccaatggcttccccgcgacagcttccaatgacctgaaggcatttactgaaggagctgtgttaagttttcataacatctgctatcgagtaaaactgaagagtggctttctaccttgtcgaaaaccagttgagaaagaaatattatcgaatatcaatgggatcatgaaacctggtctcaacgccatcctgggacccacaggtggaggcaaatcttcgttattagatgtcttagctgcaaggaaagatccaagtggattatctggagatgttctgataaatggagcaccgcgacctgccaatttcaaatgtaattcaggttacgtggtacaagatgatgttgtgatgggcactctgacggtgagagaaaacttacagttctcagcagctcttcggcttgcaacaactatgacgaatcatgaaaaaaacgaacggattaacagggtcattcaagagttaggtctggataaagtggcagactccaaggttggaactcagtttatccgtggtgtgtctggaggagaaagaaaaaggactagtataggaatggagcttatcactgatccttccatcttgttcttggatgagcctacaactggcttagactcaagcacagcaaatgctgtccttttgctcctgaaaaggatgtctaagcagggacgaacaatcatcttctccattcatcagcctcgatattccatcttcaagttgtttgatagcctcaccttattggcctcaggaagacttatgttccacgggcctgctcaggaggccttgggatactttgaatcagctggttatcactgtgaggcctataataaccctgcagacttcttcttggacatcattaatggagattccactgctgtggcattaaacagagaagaagactttaaagccacagagatcatagagccttccaagcaggataagccactcatagaaaaattagcggagatttatgtcaactcctccttctacaaagagacaaaagctgaattacatcaactttccgggggtgagaagaagaagaagatcacagtcttcaaggagatcagctacaccacctccttctgtcatcaactcagatgggtttccaagcgttcattcaaaaacttgctgggtaatccccaggcctctatagctcagatcattgtcacagtcgtactgggactggttataggtgccatttactttgggctaaaaaatgattctactggaatccagaacagagctggggttctcttcttcctgacgaccaaccagtgtttcagcagtgtttcagccgtggaactctttgtggtagagaagaagctcttcatacatgaatacatcagcggatactacagagtgtcatcttatttccttggaaaactgttatctgatttattacccatgaggatgttaccaagtattatatttacctgtatagtgtacttcatgttaggattgaagccaaaggcagatgccttcttcgttatgatgtttacccttatgatggtggcttattcagccagttccatggcactggccatagcagcaggtcagagtgtggtttctgtagcaacacttctcatgaccatctgttttgtgtttatgatgattttttcaggtctgttggtcaatctcacaaccattgcatcttggctgtcatggcttcagtacttcagcattccacgatatggatttacggctttgcagcataatgaatttttgggacaaaacttctgcccaggactcaatgcaacaggaaacaatccttgtaactatgcaacatgtactggcgaagaatatttggtaaagcagggcatcgatctctcaccctggggcttgtggaagaatcacgtggccttggcttgtatgattgttattttcctcacaattgcctacctgaaattgttatttcttaaaaaatattcttaaatttccccttaattcagtatgatttatcctcacataaaaaagaagcactttgattgaagtattcaatcaagtttttttgttgttttctgttcccttgccatcacactgttgcacagcagcaattgttttaaagagatacatttttagaaatcacaacaaactgaattaaacatgaaagaacccaagacatcatgtatcgcatattagttaatctcctcagacagtaaccatggggaagaaatctggtctaatttattaatctaaaaaaggagaattgaattctggaaactcctgacaagttattactgtctctggcatttgtttcctcatctttaaaatgaataggtaggttagtagcccttcagtcttaatactttatgatgctatggtttgccattatttaataaatgacaaatgtattaatgctatactggaaatgtaaaattgaaaatatgttggaaaaaagattctgtcttatagggtaaaaaaagccaccgtgatagaaaaaaaatctttttgataagcacattaaagttaatagaacttactgatattcctgtctagtggtataata

SEQ ID NO: 3398 - protein, 643 aa, Homo sapiens; identical to SEQ ID NO: 3396

SEQ ID NO: 3399 - DNA, 45926 bp, Mus musculus
  misc_feature (1)...(45926): n = A, C, G, or T/U
taaataaacacaggcttccggggtccttcaagtcttcatttctgaaggctgtggtattgcagaaaagttataagtccccttatatgattttctcttgatcatttgtcttttgctttaggtgtctcagccatgaacctagcggcaggtcagaaagatatcacgcccgtcatacttcccttgctgtggggcccacgctctcgttattaagttttcccatcccaactgtgattgtgatgagtgatatgtctaactcccttgtagactgtaaatgagttggtaacttacccataatgcctggtacaggaagtgtccagtcaatgcagaaaagtcctttggggacattgcgttaaatctgacaactagggtagagttcactcagctctccagcactgagtggggtagtttgctcatctccggctgtgttctctttctcacttctcctttctacttcctgactgtaggccaggctgacctacacgaggatcaaggatatggtgaactcctgaaggaagaacatatgtgacagacagctaatacccaacacccagaattcatattgtctgatttttttgttattcaagatcccgccatggggtgtgtgaaacagctttcgtcacagacagggtgcccgagaccatgaacctactgggaaggaagatctacttaatgttaaggttcacaggtttctgtccctcatctctgggttccgttgcttgtgggtctgaggcagaccatcaggagcacacggggaagggaagtggctccccctgtggttaactagaggccctgagagaaaccagagggtccaagcaaaatatgaccctaaagatgcacgtaggtaactccgttctccagccaggccccaccccaataaccctttcagtatgaagtcatctgtggattagctcattggttaagtggccctcatggcacttcccacagcacctgcagttggggacccagctttgaacacatcaggatctagagggacacgggatgtgacatgatacttcaatctttacatacagtctgtgaaaaagtagcaaaagccatcaactcttcaaaatccttgctaccaagccggtcaatgatagaagtggtatccactgggctattccacagcccacctccaccactgatcctttgatagtcaacctacccatttggaagcatttgccgtgcctctatctttgttacccggctgtttgttaatttcacagttaaagtcttatttttgtaggtaagccattctcggccaccactttaatcaacatcatgaagttctgcagttcagccatccaggaaaggctgtctgtgagggggagggccactgcctctgtggggagcgtggggaacagacgcagtgtgagcagagccagaggacatttataaatgtgaaaagtcatgtcattacattgtgctgctctaagcagattctctgagtgtcccttaagttctggcttccttcaatccttggaatttcagtttcttgtttccatgttgtcttctttcttggaccgcctttgatttttactgaacagtattgttgattcattttcctacctagggagtatggatagtaaatatcctgggttatagcatgtttggaaatgtactctttagcacttgacagtaactgttttggcagagttcattattctgggaccaatgtcctctaacttgctgactctgtttgctaggacctaaagctctctgtgttcggtgacagctctgctttccattctcttgaaggaaacaccaaagttttcatgattttcttcttataactggagttataagacattgctctctgcacccaggtttaatttaattcaataaatctttgttggcattttttgagtctaggcacaaaaagatgtttgttagtgaataagtcaggcagcagttcctgttttcctggagctggcagaatcgtagggggagacagggcatagccgatatgtgtaatgcataagaaaagtgtgcagcatgctagtgatggacaggcctgtggagaatagaagcgagcagaccaggttgagggacacggggagtttattttttcctaatcctatccagtgaggtttttcagtcttaaggactcacggacttaattaagtaagtgttcactcaggcgtggtagtacacgtctatagtctcagactgggaagggatgtgggaggatgtctggtcttttcctaatcacacagttgatggagctctagttttctctccctttaatacttctggccctttgtttttcttacatcctgaaattcctgggccaactgctttgttgttgtttttttgtccctttcccacctcttcctgcttttaagatgcctcagatccctgcagatggtaactagttttggagtacactcttctttaagttgcccgtttcctccacggtcagcctcctggttggttctttttggacctgtcttctgtgctgttggttttcctgacgtatttggaaatccttgggttttgcttatatttatgaatagaggactgtggtggtcaatatgcacacttttgtgtctttgcaggtgtgtgggttgctgggcaggccttctttagctgacaggtcagcagagagctttgtgtaagcaggcaggatctaaaagaatgttaccgagaagtagtagtaggcttagcgttgcgcatagaaccaagcaggccttgttctaagggataggacacttcagcactttaggctggggtccctacaccctcctctaagcactcccttggcagatcacctatattcttacagatcctgattgggaaacaggaagccattacttcaggccatttcctagtcttgtagggaagaggacaggcatgccaagccctgctcctgtggcctctgaccctggtcttcttgtcttctcccacaggaagccttggataggtcaggattaggttcctctggtctctcctgtcgctatctcctcatcactgcccactgcggcacaacaaagcacccacaattccgtgctttaggacatcaaagctttgcaatctgtaaagattaagaaaatttgccttcaggtggtgtcagtgttgggttggctagaaggttaaaaatactgcctacttgctgggactgtctatggccgtcagcaaggccttttctcgtggctactaggacttccctcctcatgtcatagctgggttctaagagagtggactccagaagcgagacccactaacagacctcagcttacctgtgctagtgtctcattgggaggaataggctacgctgccaagcctaatgtccagtggcgtggctcactgtccccacccctgtgacagccatcatagtcttctgcctatccctcagacttcatggcctatcaatcttattggatttttttttcttttttctttttttttttttaaagatttatttatttattatatgtaagtacactgtagctgtcttcagacactccagaagagggagtcagatctcgttacagatggttgtgagccaccatgtggtcgctgggatttgaactctggaccttcggaagagcagttgggtgctctaacccactgagccatctcaccagccctcttttttctttttaagtaggttagtttttaagcccttctccagtcagttcttcctaatgcaaaacttggtgacgtcttcttgtcctgcctcaggaacagcctgaacactactgacatgttggggtttgatgggttgtagcccgattcaccttatttattcagagtgtcaaatcatctattttccatgcttacttaaaagcatggaacataagccaggcgtggtggcgcacgcctttaatcccagcacttgggaggcaaaggcaggcagatttctgtatttctgagttcgaggccagcctggtctacaaagtgagttccaggacagccagggctatacagagaaactctgtcttgaaaaaccaaaaaaaaaaagcatggaacatttttttctgccacaacttcaatctccctatcacttctttcgtagtaaaatgcccttcctctgtctctccctcctcttcctcctctctctccgtttcgtacttggagacagggcctccagaggttggtctctaattcactatgtaactaagtctaactgtgaattctcatcttgtttttattttctaagttgtgttattacagaaatatgccatcaaacttggccttaaaactttctttgtaatcccagcacttgggaggcagaggcaggcagatttctgagttcgaggccagcctagtctacagagtgagttccaggacagccagggctacacagagaaaccctgtctcgaaaaaccaaaaaccaaaacaaaacaaaacaaaaaacaaaaaaacaaacaaaaaacaaaaagcaacaacaacaacaaaaaaaaacccaaaaccaaccaaacaaaaaactttctttgaagccgggcgtggtggcacacatctttaatcccagcacttgggaggcaaaggcaggcgaatttctgagttcaaggccagcctggtctacagagtgagttccaggacagccagggctatacagagaaacctgtctcgaaaaacaaaaacaaaaacaaacaaacaaacaaacaaacaaaaaaactttctttgagagtgcgcgcacttgtgtgtgcatgtgtgtgtatgtgtttttgtgtgtgttcttattgagaccagaagtcaccttgggtatcattttttaggaaaccccttccccaccttgttatttttgagataaggtcagggtctcttactggcctggactttgctgattaggctagattggttggtgtggtggtttgagcaagaatggccgcataggctcttgtatttgaatgcttggccaacagggagtggcactatttaagagggaggaggtgtaaccttgttggagggagtgtgtcacttggggtatgctcagagatctcaaaagcccaggccaggcctcccttttcctggagttctaccctcaactgctcctcaagcaccgtgtctgcctgcatgcctccatgtttcctgcctccatgttccctgcctccatgttccctgcctccatgttccctgcctccatgtttccctgcctccatgttccctgcctccatgtttcccaccatgatgttaatggacttaagctctgaaactgtaacaagcgccagttagatgctttcttttaaagaaagatgcttttttcataacagttgccatggtcatgtctcctcacatagcactagaacagcgactaagacagcagggcagtgagccccaggaacctacctgtttctccacattgaaattacaagtgcacatcgccgtgctaggcttccgccattatggaaattaaattcacttctccaggcttgcatggcaaacgctgtgcaaaggaaacttaccagcatgctctgttggggaggtgacacctggagcaggagagtgccctggtcaggtaggtggcggtgtctctcctgtacttaactgctagaaaagtatcttccaacatcactgtccccagattttataaaatctccctctgaaccgattccaagtgcccagagagttcttatctccatgaaattgctttgaccactcaagtatactgagtgacacttggcaaaatgccactcacctgcctgaggatgtactgaacaccagctgtctggaacatgagcccacatttactgtaggaatgttcccttaagactgagggaagcattcttctgagcaactgctctgtttttatcttatgggcacagtgaatgctacaactgattgtgtttctttttttgctctggttgctaggaaacccagggcaaaactgcagacctccactagcgactgcttaggacctttgcaacccttttacagtctgctttcattttcttctcttactgctcttttctacattacttctgtacatggcacccccacttgcttccccctctgcggtcagtattgaacatgttctatgcttggtgccgttaggggctggacgcacagcgacttcacttccctcaagatccttgtttataatgagtccactcatagtaactgtagagttaagcagtcataggcactgcgagattcttcctgtagggagggaagtggtgggttattccttcctggcttctgtcatcacacagcatccttatgatgtaccctatgagtcacactgtccttactgtgatcactttcaagtcatttgttttgccacagtgtatcccacagaacaccctgagtgtctcaagcacactcatctagagcacgttagctctgtaagaacacctactcagctgcctcctcctcctcctcctcctcctcctcctcttcttcttcttcttcttcttcttcttcttcttcttgacacttggaatcagtctggtgtttggttgtagctatagttttagcattcacagcttataggattggtacttctttttttcttttgttttttcgagacagggtttctctgtgtagccctggctgtcctggaactcactctgtagaccaggctggcctcgaactcaaaattggcctgcctttgcctccctcttctggcatgtaaaagttttaaggcatgcagataatgaaattgttttttgtcttatacatattttttaatttgcttttaaagaagtaccaatacagccaggtgtggtggtacatgcctttaatcccagtacttgggaggcagaggcaggtgcatctgagttacagatggttgtgagtcgccacatgggtgctagaaagcagacctgggtcctatggaagaagagcagccaggtttgttaactcctgagccatctctccagacccctgaatgtccttttaaaagcagaatttgtccctctctcaaacttaaattactaagttgagtgaggctctgggtcacccagacaaacttgaggtgtgtgcacagtttcctaaggtgccatttccagtgttctggtgctgtctggctgtggcatgctgagcaactgaaggagacctgaatttgtcattccttcttctttaccctttggctattagtaagtcagctaacttctcagcttcttcatccacaaataaatctatattctttaggactttctacaggagatagcattgtgcggctgtggagtcgtgggacccgtagcaacaggcctggaggaagagtggggtccaggcatgtccaaaccctggaaatctcgccctgagatcggcgggagtaggattgctttcctcctgccctgggcctgaatgtcctggtacatatagtgttgtgcccccaagccttgcctcaccagaggacataacaaaacctggtagccaagtttcatttcctctcccctcacaaagtcaagtccagccgcactggaattcctctttatgcaaatgaggcatccctagcaccctagtcctggccaatgatgtacactcagacccatagcccctacttaccagcatgctctgttggggaggtgacacctggagcaggagagtgccctggtcagttaggtgaccaggtttaaggtttaaataacctttgttgtcccccgcaagccccataactgaaacagttcttcgagagccgtttccaggtgtatgttctttgcccaagtactcactgctgaacaaaatcctgcctgcacccacctgcccagctaagcttcccttcccccatcccggcctggtgcccaactggcctggttacccttagactgagaagcagacacggagtggcaaaagatgggggttactttttaatctacagggtactattatagatgggtttctatttgctagatgtgactactcacaagcccaggggaagttctgcgaaaccttcccacctcttactatccacgtgttcatcttcaagataaagcactgcaaacacaagtccaatatgcctgttatataaacctttgtcagcgctcagccgtgggatgttagttgatggtgctgtcagggtagctgtgagtgtactggtctgccggtggcaatgcacacagacctctctcagatagctcctgtttacccttctcattgactcttcctctgtgctgaattcactgtcttgattttaagccccacctctaggctggtgacacccaaacttgtatctacagcctttgcctcttttgctggaacagatcaagactcccaattgcctttgggatagtgggaacactgtgggtactgaaaatccaacacacccagaacacgttcttttctagtctcctcccactttgtccgattctttctggcatctttcatgtctgtctcctctgccctctcattgccattgggttggttctggtcttatcatctcttggcaggataaattgtagaggcttcccaactgatcttcttgctgcctctttttctggaaagcagttgtgcataccacaggcttttaagatgcttccctcaccaggtcggaccttagaagtagcttcctgcacttgaggttttctgagaggagcctgatcacctctctgtccctcaacacctcagtttccatccggagcgggtgacgcggagctcaggatgtggcatactctgtggcatttcccggtacctttttgttagttgagacagaatctcatatatcccaggtcggcctcagacttgctgggtagctaaggatgaccttgaaccagggactccctctgcctccatctcttagtgctgggatttcagatgagcccccatcaaagtcagttcatgaagtgcacgaggacagagccttaagatttgtgcacacaaagcaagcacgatcaactacacccccagcctctattaagttatttccataaatatgattctgaattttaaaaaagcccaagcatggatgagaaggaatagaaatgatatgcagcaagtgtctaggtagacaagaaagattcagagcagcccgagagactcaggatacacgcagacggctaaagcagctcggtgtgggatgtggaggaggttggactggctgggaaactggcctaggagatggcctggaggagagaaggcgctttggggaatgaaggaggtggtaaaggcaaggagcgatcatggaagatcgtgagcgatgtccaggttcccgctgagacttctgggagaagctttgcgagatgctgccgtttggacagtctttacccttttgtgcccattgttggctgagttttcaagaaaagggagggcagatagtaggagagctggctttggaacaaccgactggcctggtgcaggttcattttcctcacattgaaaatgagccaaatgacctgtaagcctctgacctaaagacaggaaggcgcgcactctgctgcccccactgttgctccggagcccacttcttttcccttccctggggccataccaacaggactcaggcccagggggcttcctgagcacaccctgctcaagcagctctttgggcggcactctcatgctctacacccagacgtctgggaatattccacgaagagccctaatcttcaggacctgccaggctagccggtggtaacctggcctccaaaaacactccaggcaaggaatgaacgctgcctcagtgtcttacatcagggcattcctctgagggtcagttctgctacaaaaaaagaaagggagcaggagacagaccagtgtgctgagcagtgcagggcaagcactccacgcttgttaactcggtcgatttccacaatcatacgagggagcaggttattcccatttcacagagaaatgatacagaatgtttcagtaacttgatcaaggtcaaggggcggtgagtgagcaaccaaggtggaaaacaaatatttccacttggcactggaacattggttgcggacgttgatggcagctgtgtgtagggaaggggtgcgcgcggggggtggggtgggagggcggcacagtgttgttccaggagcatctgtccccacaggtctctgagccgatctcgcgggcctgcgggctctgacaccctcagatctggctccaccctctgctggcccttggctcagcccagctccgttccagctcgaggatgcccagctcccatctgtgacccgcgtccttcgccgggcccttccttttcccattaaagcaagcgtcctggggcgcttgtctcctcgcggtggctgctgagcccttgcgttcgttagcaggagcctggtggggacgcctctggggatcgtacagcggccctagagcacccgggtggtgcctctctctgtgcgcgccgggcagctacgggcgacggggacgcgcagaggagacgcggccgggggccgcctggaagggcagcggcgaggggcgcggcgccgccggaagctgagccaggggacccccggcgcgatgcggtgaaagaagagcgacccggaggtggcaatgagtgcctctgcggccacgggggtttttgtgctgtccctctcagccatcccggtcacctacatcttcaaccacctggcggcccagcacgagtgagtgagcgcgcgcggggtagacaagagcccgcaacttttccgcgggtttgggaccgcggctttgggactgggtagcttccagaaacgccacgcccgcagcatgagggaggcaccagggtcacccggccctaggtcctcaaactgggctagggcagttcaaggtctgagagctgggcgcctgctctttgccagtactgggtgggtagctgatattaccaaggtcaataccgaaatgcccctgcctccgaggctctcagacactagaggggtgcagagcaacacggaaggcacgaaccgccttatttgaaaggaacgctttccttgtatggactttcacatacttaccattttataattttagaaactgttgtgagcggctaacagaaataaccatggttttctgagcctttgctactaacagggtgacctggctttagtgttctggtctgtctttgcacctcaaggatcttgtgggaactttgtgcaagggcgctgtgaaagggatagaggttcgatgctggccaggagcaaaggttcagtgatcagtttaatgctaaggaaccgacgaattctgtaagggctctgggtcccagtcttggctttcacttctctaaagggatcactgactgacgagcccccatgggcagccgaaggcctgggtggtcagtggaaaggcgccagcggtggccctgctgaagttgattgtgggctgctggaggaggaagtaactggctgtgcttttcatagcagttggtgctaaggaaattgcatcaatctataccctgcagcccgtgccagacctccagactgctagcggagtatgcacacagtcaatggttttctctcactgctgaggtcacctcatccagacggcatgagtgagcactgcgacgctcccttagacacaggctgcccctgtgcttggcctttggtgcatctcctgaagcagcagctccgagcagtcagatgttttgtgcctgtcaacagagcacagggacctaggctcctaaagtaataccattcattgaacacctctgtgcttggagccctcgctgaacaggccatgtccttgctgaggagtcatgcattaaaacagacaccatcagatatatagagtagcatgctatgaagacaacagagcagggcatagggaagggggtgagcgtggtaggggaaggaagtggatgtgatggacaggcatttgcaggaagagcaatttaggaagggctgctgctggtggtgaggatttgatgacatattactgtgtgttactgatcagtgctgagccctggtgtggactcgttccagccacacacacatacacacacacacacacacacacacacacacacacacacacacaccctcctgcacggttggacctgcaggctaaatgccagcagcccataacgcctcccttatagcacttcactttcttcttcctactgtctcctttcttggtaagtctcagagctactctagtgtccatgtcctcctctgagttcgctggtgctggcttactctgacacagccaatggcaaaggctccctcctgcttgagccccttcacatctctgagcctccagctcccccactcccacccccaatgttgactgtctttagcacctgctccaccttctcgcctccttcttccttcctccccattgctgactgccaaagacacgcttagcttgacagccctgagtaaatgaaacggtcacttcttcatttgtgcatcctcccactgaatcagggccttctgctttgagccccctcagcctcatgactcacttttcccacagagttccttcctgtggtcagagctcaccttcccaggctgtagcctgtcttggtactgctctgtccagcccagtgccttgtgtgtagcaggcattcagttacactttcttaacctgggcttctgtttccccagggtcttttatgaaactcagaaatagcctgatcagataggttgaagggtcaggaaagggcttgagggggggtctcacaatgcacccacctacacctatgttcagtaatggtgagatctggggacagagccttgcaggtgttctggggtatatgtgagctaggtaaggaagggggagggctagcctggtgtttgttgggagagcagcctagggctgtttggcagtccggaggattcaccaaagagccccagtaacttttcccaccattcaaggctaacaaccatggcttattcaaagctccgcttgcccatcacctgcaatcccacttagacctctttctgtctgtctcaggcatgtgttgttttccctagagggtctccaagaacagacctaggaggaagaaatgacctactgccccagtttctcttcatttgtcttcctctctcagaggtagggagcatgagaggacagcctgaactaattcatgctgcctgccatatcccatcagtgcccagccccgaaagcaggctggctgtgagctcagtctttggtgtccagggagagccctgtctcctgaccagtccccgcctctgggctcatccttcacaccttgtcacatggctcacccaactgctcctctcctccctggatatcttagagcagcatcacgcttgtgacccatgacaggttctccttcctctgctttggacccttgtgagacgtctggagaaggcactgctgtgaggcattagaaacctctatttttagctctcccacagacccagcctccttctcatgatattagagaactcatcctacatcccaaggctctttcacctaccacccctccacccactctccatgtaagtgggtacatttacctgcccatcatttccccttccgttctgttcatccccctttcttcctcgttcccagaggcacgtgatgaaggttatctggagatctcagggtgcaggccatggtgtggagacctaccggctgaggatcagtgcttgtagcgtctctgagtggcagtggagggagagtgggtggtatacaccagggtgacagagagaaccaggcagatatttcgccagaataggaagtcctgccagtattggcaatctggatgtctctgtagggctggggtgtccttacggtaggtggagctcagaatctacaagataagtctctccatgtagacagaggcctctcttgttcgtctggagtctctctgaggccagtaaaggtacctggcgcatggggaagcagagctctctccctggagggcaagtgcaatcataaggaactcagtgtgaggggttacggctggcccaggggcggtggcagactcggtgcttaggctcgttagcttccagggagatgggttagagaaacaggagggcagaggcagctaggccgctgccatattagaggtaagggaggatgaggaagaagcaggtgcacaggatgggtgggaaggagaaaccaatgagttgggtttctggtcctgagcgccatggggttgtgacccagatccgcgtgcagtagataaaccgaactaactttccaatgcaattgaggctggattccaggagccttctgcagccatagccaggaaattccaggcgccattgtttattgtgattgctgaccgcctccctgctctggtcctcacagttcctggaccattgttggggttgctgccctcatcctgctcctggtggcccttttggcccgggtccttgtcagaagaaaaccaccgagggaccctctgttctacggtaggtaggcttcctcggaggggaagggtttgtatcctctctgtggcaggaagccgggcactgggtctgactaccttctgagctgtgactgctctgagcccacagaaagcggaagtggagggctgttccggagaaggctcttccctctcagctcccctgctaggcggtggtgtcttctttctaaatagagttctgctggagagtgactggcagggccaggcgggcctcctccctgcactctgttgagcccccagcgagctcttacctcagcctcctggctgggctttctgccttcaactggcagctggcatgtggcattgaatttagtgtacggtgtctcagtccacaccagcggttcccacccttccaaatgctgagaccctttaatactcgtgtggtgacctccaaccataaaattacttgttgctacttcctagctgttattttgctattatgaatcataatgcacatatctgtgttttccattggtcctaagtcagccacaaagggttgcaactcacaggttctccctgtttgaacacacacaaaactgacccttagagaaaccatatacctctcacgtctagctgcacctctctgaagtcagcactgggtccttatccctgtcccacccctaaaccctacaggcccagaccagtcccctctgctgtctatccttcttctctccctcccccagagagcccacacttaacctactgatgcagtcccccgtccttgaggcagggcaaccactcttgtgtcctcagttctgttagagcctaggtcaaggctttgaccttgaggtcaagccttgaacaaggttcctcatctactaggaggcagaggctctgtcgctgtcacctctaagacagtatctaccccccatggctcagcagctgctaatgggttttccaggagacacgatggctactcacctgggagtcagcaggaagtagccatgggcttgcctcagtggagtctggtgaaacattctcagggacgcctcacttctgatggcttcccaccattgtatctatcccacgctttttgcttttccatagctttccagttcaccaactgggttttctacagccccttccacgggctcagacatcagttcattataacctggaaatgcagttttctttctagactcagaggccctgagtgggctccccagctgttaaaaagttctggtccacagctggtgggcgctcatagtgtgtaaagcttagttagggatcttgtaaaactggctggattcctcagacaatgcagctcgtctcctgcatctccagccataccatctcatgtgcattttaatcccagcactcgggaggcagaggcaggcggatttctgagtttgaggccagcctggtctaccaaaagtgagttccaggacaaccagggctatacagagaaaccctgtctcgaaaaaaaaccaaaaccgaaaccgaaactgaaaccgaaaacaaaaaagaaaaaccaaaaccaaaacaaaaaaaatcaaaaacacaacaaaaaaaacctcactgcctttcttctgaaagtggttggcagtcacatatcagccacctgtcatgaggacctgggggggggggcatactcttaattgtcctgcatcccacactggaatgacccatcttttctagaccacccgagggcctctttgactgcctggtcacaggcacaggtcctgctgcccaagtgggatgtgggtttcattcgaagctaaggagcatagtggggtcgcctggcagagtattctgggacaccgcgattgtctccctgacatgagttccctcagggagagccttggataggtatgcagaggtccgggacaacgggtaaatgctcagctgatgtgaagcagacgcagcctgcttctctgtgtagatgacgcccacagaatcttctgggacacctagtggatgtcccgtcctggttgtctcctatggcacgcattttcacctctcctttctttgttctagtgtatgcagtgtttggatttaccagtgtggtgaaccttatcataggcttggagcaagatggcatcattgatggattcatgacgcactacttgagagaggtacgctggttgctcaagggtcgctcaatgagtgggtggctcaaatgcaggctgctgttggagtgtgtttcctcagtcaccaagcaggcagatggaaagccagccacagaaaacagaggcccgggagaccactctctcttcacagcgccttcactccagaaccaaggtgtgagctagcatttccctttaagtgaagaactctacatggatttagtatttgggtttctgttactgggttgtaatctcagggagtccctaaccagcctacctgtaatcaggatacctgtaatctcagcatttgggaagctaaggcaggaggattgctgcaagtctgagggcagtctgacaacatggggagttctaggccagcgtggactacagtgtgagaccctgtatcaaaagtaatgataataataataatatcaaggtacttacttaagcttttggaagtccctaccaaccaaatcatagcactcgaggaaactagtcttgttttctaatttagagtgggtcaaatccagtcccagagtggccaagtgacttgcttaaggtcgcgtggagagtaaggcatagagatgaaaacagtgctgtctattatctttctgtgcttcaaatgatggggagtttatatgtctccccaggagtgtgtgtgaggagagtttgaatcagggaagaaggcaagtttgtaggcatggagccatgccatgaggtgggacatccctaaggtggcttcttcaaggccagcgagggcatagagctagccagaggcagcgcagggcaaacagaggactgagtttcagggattgggatttgggggtcgagttggggtggggagtgatggagaggaccgctggggaggacgtcctggttcctgctttgaggtttattagaatgctggaattactatgctggaggcttgaggagccacgttctgtggagagtcattgaatctaaccttgtctcctgcctttaaagttcactgtctggggctggagagatggctcagtggttagagcactgactgctcttccagaggtcctgagttcaaatcccagcaaccacatggtggctcacaaccatctgtaatgggatctgatgccctcttctggtgtgtctgaagatagcgacagtgtgctcacatatataaaaatgaagacatctttaaaaaaaaaaatagagttcactgtccaatgtgaagggaggatgaccttgccctgggtgtgatggcagaggcacactctctatgacaaaggcacactctccatacagatggatgggctctggggctggccaggagggcctctttgagttgctgttgtttccacagaatttctgaatggccatgggagaggagcacacacacttctgcatggtgaaaggaagggaaaggccttccttctatggcaaagggaaagcttaggcaaaggtctggagagcaggcccagtgtctagggcccccctagggggcctaggaatgtttgcagagtgatgcagagctcatctgggaatgtttggagtcttgagtgcttgaaggacatctaccaatgccccagatggcgggtctgggcaggtctggacctttgaatgatggttctgttacagaggctcaagagctacccaaatatagttgaaacttagaagtccaagaagagaattgctcccacaggcagtgatgaagagatgctcaaactctggagactggtcagaaggggaggagctttggaaatgggccatggtcggcagacagaggcagaagggaagcccagagaggggccaatgggcccagaggaggggtcttcaggagggaggctgctggtcaggggcaagatatctacctggtgaggttgacaagaaacggggcaaatagctacaagaaaggaaactggggtgcaacagtggtaagacccgaggaccgagtagaagagatggggcttgtgggcccgcagtgggagtgtgggaagcggggagaggtgatgtccatttggaatgtagccgtggttctctgcgtgactctgaaggcctactgtgatgaagagggaagatcgcctgagctgacagcatagacacaacattggtgagatttgtccaaagtctgcacagcagagcttggagctgcctgagccctgtgtggagaggccaggaagggcttggctgaagggagaggcagttggagcttggctgaaggagttcaggtgagtttgaagggcccacgggggtcagtcaagctctcagaggaggccagtgctggctcacagagttgagtgtgtaggtaggaatgactggagccatgaaataagttggaattatgcagtgaatgccaaggtgagagaaaagggcagccaggctttgggctagagtttgggtgtggcttcctcccccattgtgattgaatttgatttgactttgggcaaaaggctgctttccttaccccaggggaaccacggcatttcagagaatgcctgcttggatgtttggcatagtttggctgctcagacctttcctagttagagaaaggactgcaggtattttagggatacattagaaacaacctgggagggcactaacctgggagaaggaagagagaaaacaccatcggagaacccaagtcccctgaggggacccggaaacaagactacctggggggagggaagtatacatagttcatcatataatcttgtattcatgaaacaaataatatctcagaaatgtggttctgtgttagctatgtgaccttaggcaagtcttaaagcttttgaaacacatttcctcctctcaggacagtcagtcctgaccaacccacaagcctgtttcgggaataatgggtagataggaagctgagctcagggctgcctgggtgtacccacggaattgggcccaggcagctcctcactactgcccagcccacaagcgcagcatgagtggttacggccagcaggtggcaccagtgaacagggccttcctgggctgcccctctgtgcgaaggccaagcacctgcaggctcaggtttggccttgctccagctggctgggattgcccacacagccatctgatgcctttgtgttgttgtacaaacctttgctgagccatcagatgccaatctgtcagagattctcctgtctggcgccatggcagaccctggttttggcagccctagggtaaagacatattttcacagtcctaccaactgcacggaggctgtttcatctcagcaaatgaacagcatttagctctgttgttttatttgcaatgtaaagatccgagtcttccttaacatgtctttttaatgctttccttagggtgaaccgtatctgaacacggcctatgggcacatgatctgctactgggatggctctgttcattacctgatgtacctagtgatggtggccgccatagcctgggagtaagttagctctcctggctgtgctatcctttgcaactcataaggggtatgtaaggacagtgcatgcacagaggcgagtacgcgagggcacgccagggcgagaatggatgagctgaacaaagctgtatttccctgaatcactggtttgttttgttctattgctttttttttttcttttttttttttgtggcagctcagacagaatctctcttggtgtggtggctcacacttttatcccagcactcaggaggcagaggcaggcagatctgtgagttcaaggccagcctggtctacagagtgagttccaggctagggctacaaagtgagaccctgtctcaacaaataaatgaacacacaacaacaacaaaacgtgtatgtgtgtgtttgctatgataggcaggtggaggttaatttacacaaggctggggtctctccttgcaccctggagacctaacttaggttgccagcttggcagcagaggcctttacccactgagccaccttgttggctcaccatcttatagttagaggtagggtatctcgctgaggtaggagctcgccattttggctaggttggctggccagcaagcccctggggtcttccttgtctctgccttccccctggtgcacaacaccagtctcggcttttcatttgggcgctagggatctgaactcaggttcacaaggagccaaagtcaagcaccttgtacttccatggttcttctggtctcaggtcagagtttcgcctcaagttcaggtgtggccccagggcttgggaaattgcgcacacacacacacatttgggttacccctcaaatctgtgtggctggcccctctgggagcatgactgtgttattaaagaaatgaggtaagattttgtgacagttgctgttttgggggtaccagtaccctttgctgtgacaaactagctgtatctcacagcacatgggctctttgggggaactcccgcagcagaattccttgcatcacaccaactgcaaaagtaaccagcggctttggttggattctcactctctgtccactatggcttccatggcttcttttgagcccaggaggcaggctttgcctatggactctttccaaacagcctgagcttccccatcctcagtgtggcctgaggttagagaaggtctttcagttctgtccctggaagctgcagtgtgccccatgagctgacccccacttcctgtgtcatgcttcagcttggtcttgtctgtcttcctgtggcattctgagactaatcattggcctggctccattaggggctgcagcagagcagaaaatgtacagtgctcaccactctgtcccctccttttggattcctctcagcctctggtgtggtgttgtttctgggttatcagttgaagggacatctggccatcactgagattagagcagcccctttagaacacagggacatgccactatcctcacctctggggctttatcccaaactcagttgccacaaaaagtccactttataccccagcgggcacctggagccccagtgctgggtgcagtgaggagaaaagaggaccggggattgctgtccggccacttagctgaattggccagagctccaggctcagtgagaaaccctgtctcaaaaaataaggtggcgagtgattgagaacggagcctgacagagccttctggtctctacacacacatggagaggcctacacgtacatgtgcccacacacacactacatgcttttgtgaatgagtgcataaagctacaaaggacacaaaggcggctctgttctgtgtcacttctcgaagtgatgcttgatcgtcagggtttcttgggcttatcatttgatttggtgagtttctagtcttgtgcctctataactagaatgaaagataaatttaggatcgtccttggagtcccaagacaagtgcactgtatcaaaaatgtcttgttgtagggaaagctacagaaccattggcctatactgggtcggatccattataatgagcatcgtggtttttgtgcctggaaacatcgtaggtaagaaccctgttctaacggtcactttgttgtcagcgtctgtctgctttgcgataacgggtttttagaggagttgttttttaaaacattgtaatagaataattccaatattttgaaaacaatttggcaaagttgttcctatcccactcggtgctcttgcctgttaggaagcgcttcctggctgctttcagacgcgtgcactgagcagttagctgaacaactggcactggtgcacggacggtgcatacagcgccgagtatcgtgcttacccctcacacactccgagagctcatgctaaatgcactgggacattaagagtcttccaggctgaagtaagagatgtcataggatgtgcaagaccttaggacatatgtgttatatatactttttaatgtatctaggacgtcactgttacaaacatctcatggctctaagttgacttgtcttacctaatacaaatattgcctggttcatagcgaaattgtataatttgggatggaaggtagcttaaatgtgactgtatttatgtatgcagtatgtaacgcagtgaacacacatttgactgtcttttcctctttcttttgaataggaaagtatgggacacggatttgccctgcatttttcttaagcataccatatacatgtcttccggtctgggctggcttcagaatctataatcaaccatcagaaaactataattatccctcaaaggtgattttattacatttagatttatccactgtgaagatttcagtgctggcgtgtgaactcaggctagctctccagcagctgctatgtcttacttattctcagcctcgcagggctcactcacatctcctgggaggagaggcacatctgggactgtactgatggcctggcatttgctgccatcttctgtaacatggccgacagtctgcttctgcagactggacggcccgagcccatccaagccacacacttctggggacttcctttgcagggaatcgcctccgttcctgttacccttctgtgttagtgtgacaggtgaagttcagagaatgtgctttgcttgtggctgagcacctgatacatttttcagtaatatcatttactgctgagggttccacatggccgtaggatctgttccccggggatgctggcccctggacaggggttgcaggagcacacccgaggcccctcccttccattcactgctgagacggtgtgggcgaggtaaggccagccctgcagggttggttaaacccagtgatttctttctaactttctcttccgtttatacacaagatccttgggtaaggtcctttagatctgcactactagctagagtacaattactgaccttacaaagccattttagctttaaatgtattatttttgaggcagggtctcactatgtagctggccttaaactctgtgtaaaccagagatctacctgtctctgtctcttgagttctgggattaaaagtgtgcaccaccacacctggcccaagttatttttgcaaatagaaatcattaaaatgccagcactcgggaggcagaggcaggcagatctctgagctcaaggccagcctagtctacaaagtgagttccaggacagccagggctacacagagaaaccctgtctccaaaaaccaaaagaaaaaaaatgctgttttaggagagtgttgggaataaagtcatggccacctgtgtgctgaaccatgcagatttccagcttgctccatgtacattctaacttacacagttagtttgtaaatatttagataccgctattctaacttacacagttggtttgtaaatatttagataccgctgagtaaactcaggccaagggcagctacactcatctgtctgtttgaggagcgagtgggtgttaaaggaaaaggtaaacagaaaccctgtggccccggctccttggccccgagaggtctcccccgagaggtcagggtatgaacactctgcgtaacagagacacagaaccagttgttaattcaatgctaaagcacagctcataagaactaaactcagagcaaacaaagccaacctctcagaagcactctacgaagagtgtaaccaggcttccagcccagccccaccggggcctttcccgagacaggcgtgatgcagacaacagagatgcctttgccagcctgttctccatcacaggaagcattccggtgaaaactgcccagcgtcttgcagtgggaggacaagtggcttccttatggtgttctcagtttttaatcatgggggtgggaggcggggggagatgtgctcacaggcagttattcagtgaatgcaaaactgtttgtattctaagtcctgtttttcaaaaaggttacatgtgagtatatgtatatacatataaatgtataggaacgtatgagtcaggcatggtggcacaaatgacatctaatcttagcaattgggaggtggagacaggatggatgatcatgaatttgaggctgacctgagctacccagggagtctatctcagctacataattgagatcctgtctaaataaaacaaaaacaaaacaaaaaaacaaaaccaaccaaccaaccaaagctgaccatcaacccagcagctgaccagccaaccagagagcaccacagatgagggcgaccgtgtgcagtgtggcagcttatggtttactgtctaaaacttcatttttcaaatgaacatagctaacctttaaaatcataaaatcatgtagtttcaagaaaaaaaaatacagactaaagctggaagggcacacatcacctggctcagtgcctccatccccagggaagggatgcactggaggaggagactcttgccgtcagtgccagtgggctatcatgtgaactgggcctcttctagactcagtattcatatcctgccattcagtgtttcagacttgtctctggcattgggacaagtttgttctctggtggcaaactctatttcaggttcttcaagaagcccaagcaaaggccctgctgagaagaccgtttgacttagtgttggttgtgtgtcttttcttggcaactggattttgcctgttcagaggcttggtaagcatggtgtcaagtaataatatactattccaaacaggaaaaaaccctctctcttcctctctctctgtctctctgtctctgcctctgtgtgtgtgtgtgtgtgtgtgtgtgtgtgtgtgtgtgtgtgtgtgtgtgtgtgtgtaaaatcaaactgacaaacttctgccacagcctggagctctggactccttcctgtttgctatcagcacccccccccatcccccccttgcccccacgcaggaaatgtctcatcctgggctatctcatctgtcttcctttgggccctcaggtcaagctctgtctagaagtaaaatagtcacctgacaaattagtattagaattttatttttttgtttcctttttttaaaaatttttatttctttctgatgtaaaggcaaccatcatgggtcagagtgatcctctaagacctcaattcacctgtggtccagagtgtccacgtgctctcaagagtggggtccctgatcctcacttgtgcagggtcccgtgagtttctcactgttaagggtattgctgacgtaggctcaggtttggagtctgataacatgaaggcctcacgagctttttggttttgttttctttttcccttttccctttatcatttttgtacctagtaagtactcaataaacaattgttatggtcttaattcattagtgattattcactctgacccagctttataacttattcttagaagaaatactttctatctcagaattatttgctattcatattcagcttcaacagttaccaattattctaaactcactggtgttggcacaagttgagaacacgccatagaacctttttgccaagttcaaacctaagagacgagtggaatccttccatgcccttttcctcttgcccctgagagagatgtgtgcttgtacactgggtggggcttttgcagatgagaatttgggcagaggcccaaatccactgccagcatgtaatctacattgtcatcgaggtggaaaatttcatgtgcagccaaggatatgaggagtggtgcctgagggcgaagtgtctcaggaatgtgccgaagactcttctgtggcctggtgttcagtgccagggctcaatctgctctccgcccttttacaaagtgggcagaggggggcttcacacgaggacccaactttcttttctttttaaatagatttatttatttatttttatggatatgactacactgtagctgtatagatggttttgagccttcatgtggttgttgggaattgtatttaggacctctgctcgctccagcccaaagatttatttattattagacataagtacactgtagctgtcttcagactcactagaagagggcgccagaagagggcgtcagatctcattacagatggttgtgagccaccatgtagttgctgggatttgaactcaggaccttcagaaaagcagtcactactcttacctgctgagccatctcgccagcccaggacccagctttcaaagcaatccttactgcctccaggggccatatgctctttgaggcactggagagaggaggatactatctttgaatcttgcaaagcatagtacagttttgtacagaagccttccttttcttcctgtagaggcttgttggccgccccagccgccgtgctttagctcactacacctaggtgcagaagctgtgactatccatctcaaagcccttctccactgttaacgtaggcttagccacttagagaggtctgaacatttcttgcatatttctccttttccttttactggtgagcctataaagacacatgatttatgttgagaaccgaagcagcttatgactaaagctggcacaccgccttatcagcaaaccgaagaaccagacaagactatttataatgatctcactttgtccttagattgctttggattgcccagctgagctctgccgactctacacgcagtttcaagagccctacctaaaggaccctgctgcttatcctaagattcaggtcaactagttacaatttgtctaaagttaattctcttattttaaatgggaataggaattagcatttttatctttgaaaatatttcatgtttttgcttttttggttttttttttttttgtcaagctgttaatttgtcttttccttttttttttacacagatgctggcatacatgttctattccgtcccttactttgtgattgccctttatggcttagtggtccctggatgctcatggatgcctgatataacgctggtccatgctggaggtctagctcaggtactaagactattccctgagggtgggaagttcattagttctctagcttttattggatttatgtagcccatttctgcttggtgtctgagtaagaaattgccttctagtgtgttggaaggcatttctgctacatacacacacacatacaaacacacacacaattactttaaatctaatgataccaccttgtagatgtggttaaatggtgaaattaagagttttctggagtcataagagtatcaagcagtactgctgtgtaatagaaccgtttcccaaactatggacataatgattactgatgagttcagaactgtaactcttaagctgtctactagagctaaatgaagagtctagagctctgctacacaatgctcagcagaaccaagaaggctggttctgtttctgcaaagctgagccttcctggtccctcaccctggcacctcgacaagttcctgcctgacagcaggtgtttaatgaaagcaactctgacctggaaatgagattggggtccacccagaagcaaaacactgtcaattaaacactcatggtacagtaaccacgatggcagaaagaccccagaattcatagggttgaaaaacagagtactcatggggtcagtgggctaaatccttcctagggtacttaattagactatttatagaaaaaatagataatgcttgcagaagaaacaccacttagctctccttggtcagtctctgaataccttatcctcaaggccttggcttgggctttaatttcatcatcttcaaggccttacaacttataactgtaagctggtgacagtctcttcagccctgagtgctaactcctaaatttaactcccaaattaataatctcatttggatgtcttactagctcatcagaatttttttttgatgcgttttgagaaacttctggtgtctttgtaatgcaagcaggtacacatgagtttttaagcacagctgcagatcaagtatcagtctatacaagaaaacatattttcctgtttgatgcagagtcttgctttgtagcccagactagccttaaactcacgatctcttaccttgtccagggagcatggcaaatgcagagactcaaataggactctcggtctcaccatttctcctgttgtccattgtctttgtaaatagcctgagcttgcattggccaactcaagccaaaacctggaatcttctaaattcatttcatgtatatggtgttttgcctgcatgtgtatctatgcaccatttgtggacctgtggaggctagaacaggagccttctcacctggacctggagttccagatggcagtgagtcaccatgtgggtgctgggaattgaattccagtcctcttaagaaaagccagttcttttaaacactgagccatctctccagaacctggaataattctttctactccccttcccctcacccgctacgtataagcccatctctaggtcaggtcaaatctgttgtttccagtgtgagcctgttgccactatgctagtccgagcgtctaacctcctgttttgttttacttgcctgtgtgagggtaggctacatgctctgtggtagtaatgaagtaaacacgtgttttactggggccagtggagtcagctcatgcaaagatcacaggaaagttttcatgggccagattttgcagtttagctgcagggaaggctggcaaatgtgatcttagttctctgaagcaatggtgtaactaatggacggaacatctgtgttcttatttaaatgactaccccttcaaagatgaggcacagcatcaccaaatgacatgtagggctaaattcttctgtccagctctaaacctcatatccacagcatcatctcctcctgcccctgcaagcaatcagctgaggcagtgcccaacagcacaaagtaagccagccctgtgtgtggcatcggggagcagaaccactgtagggcaagcatagtggtgggaggcagtgctgcctgcagccagtttttgagggctgaatgggacgtcactaagttgaactgcttcaggaaacaatagatggatagcatttaggtatggaagcaggtggtcagggcagacttagcagtagcttttgtctccttggcttggttccccttttcacttgtaccctctagggcaaaggaggcacacttacctcactctctccagccagtccaacagctaactgtgctttgattcaggtggacatcctctacatgacactgccaccaccccaagataggattctgagtgtcctcagctaaggtggcaaaggacaggtatgcagcctggtcagtctcaggggataactcgagaactagacagaagaaccgaaacgcatgtccagttatgtggaagaatcacatggccaagacaggaggtttaggaaggcctaacctagaggcaaataggtttagagcctacagcaagactaaccgttctgtggatgaggcttagtctgcaagtgggtcgctgtgactccaaacaggtggccctgggaagggcagcctgggctgcgggcctggcagaggtagggcagcctgggctgcgggcctggcagaggtagggtagcctgggctgcgggcctggcagaggtagctcagccagactgaaagcttttcagcagatccttggcttatctatcatcgtccagtttgacaagatagactgaagtctctcttgctgttgagtacagatccaggtcacgagggtcaggtcctgtaatgtccgttttctcccaacagatcaacccacgtggcatggtgcagagattgtatgttcaacatcctcctagtttgggctttaatatctacttattgtgttcagcttctgtaaaagttagaaatgatgctacaacaaagcaatgcacatactgaagcgcacttaggaaatgcccgcctgttatgagggtattctcgtggcagaaaggatctctgtcaccttgaccagcatcccctagcttctaaaactgttgcctaattcagacacttcagcctcctgtgctggaatcagaaacacaaaccaccatgttaactcctaaggcactacagtggagtaagaaaaattcctaatgtttgcttatttaggtcactggaagacacactgggtgattggttattgggtctttgatttcagactgggttaggaacctctcaaatctgtcctcttcagaaaatataagcttagtcaacactttaaaataaaaacccggccaagttccactgggggactttatctctcttcatacacagcttgctgctataggactaaagttgtaagactaaggagagacacttactagtgcttcctctcgcctggcgcagtcagctcttagcgatgtgcagaaccaaccaacttaagagatgtatgttgaggcctgtgactgtaatcagtactgaacaaaactttctagacttttcttatttccaaaaagacagtacaactgcgtatactgcatgtacactgtttggctctgtgagtcatttaatgtaacacgtgcacaaagatgtacagaagacacaaacatgttttatataagggacttgaggctccaaagattttgacatatatgggatttcccaaggtgctggaaccagtcctccttggatcccaaaggctgactgactgcacactgttagaatctaagttaatataatgaacagcaggagctgatcaagttcctcgtcgtttctaggtaattcagtaaatccagttaaagcgacgtctgttactttctcttctgtcaagctgctgaggcttaaatagggttctaagtccagagccaacgacagtgcctgacatgtcaaagccatgcgactcctatttataattactattaatacagattcccagaaaggactgagagaaaaatgctttctcactgagattaatttttctacaatttaagcaaagtgtatccctcatataatgacctaaaaaaaccctagacaaaagcttaggggtaggttcctggtgggcattcagtaagcccatgctgactggggccagctgagtctggtgacatcccttcccatgcactgtccacccccaccctaccccacccgctctgctgggatccacaggtacatctgtggacagtctagctgaaaagagttgatcttccttgagttaagctttgtaacattttttccttcaggaaaaccttttcggaagcccccaggttaccaatctcccatctgctcgggtgcttcgttaccaagcacctttagtggtgacattttgacgttgggttttactttcttacatgcttctcctttgatagaggagttaaaaggtcagacaggtatctaactgagctttgtgagcctagccctcccctgctggggcagacctttcacctggcttgtggtggagctatgacccaatcgagccataactgccaaccccacgctgtggggcatctgcttgcagtgaatgaagtccaacagtgggctacagagtttgccctcttaacatccacctggacatgtaaggctcacttcattttggagccaggattgtgactgggggggggggtcatcctttcctaattttctctataaacacaggaaagggagctattacaatttagcttttgcttactttcattactatgttctaaacatccaattggaccaaaacaaaaacaaacaacccaaaagccaaaaacaagtatctcttatttctactaggtagagaagttagaattgactcaaaggcaaatgactagatgtgtcagccacatcactgagttttatagttatcataattgagatgtggaatttagcagcacacagtaccttcctccctcaactccagcagggttcccagcagagttctaggccctgcagggaagcaggtgtggtgggtactgcggtccagtaagcgtgggaaaggaaccctgagcagctgacatcagaggaagctgcaggtgtgggcccactcagctgccacaaacacacccgtgcagtgccaggagcggcacacaactggtctcacttttcttttctcatgggcacacaccttttggtaaagaatgttatgatcttcaccccttattaataattctgagtgtaatgtcctactactactactactggtataggaaaaatgctttcaagattctttttgtattctgacagtcacaagagcattgttgttgaatgtttattgaactctaacaacgtgataggtgccacacaaaacattagacacagtatctgcccagtgggcgtacaatctaatctaaggacgcatcatttttttgaatgttgtcatgaccttcctgttcacgagaatgaggtattaactgcactgttcagtgcagagaagggcccacacaatcactgacctttcatacaggtttacctatataggtacacccagctgctcatgttacttattcttgggaattgtgggtagtatttttctgtcattttatgatgagcacaataatctctaaggatagaatcactaaacccacaagtctgacaaaaccagggttcaaaactggcctctagtccagaagaaaattgttgtatgttcaaaaaaaacagctaaagcagggcccagagaacaagtgtcaggagtcaaggcttctgccagagtccccagactgttcacagcagtgtctcttctgggcagcttccaaagtgccctttattctcaaggactctgtctgtgtagccttgagatgcactcatttgctgggcctttggctttgtgccctagggagtgtgtctgcgggcagaaccttctcagtgcccgaggagaatcacagtgtgggtaagccacttgttggtccttgtcaacacacatcaggaatttaatttttatttccagagtagtaaaagtatccggaatatatcagtaatttataaattgtagcccattaaaatatctgccatttatacaaattcctaaacatgctcttttctttgccaaggtcacatcaaatgccaagtagcacttttatctgttagcacttagcactctcaattgatcatatggaaggacatataaggtaacaatacattaagaacacactctctagtgattcactgttacttctgtctctttagattgcaggatcctttatcgtctcactttgatcatagtatactgataatctgccatttaactacatttaaatctttagtctttatttctgtgtatcttgaatttcaggcaaacataaaagtgcagacttggggtttgcattttataataacaagttttctgagaaaaatactctgtcggttttcaattctgctatggcctgtattacttttctaatagtttttctctgtgcttatgaaaagtacaaaaaacaaatgagccaagcaaaattcaactggcacattctgaatagtttataaactatcccatgtaaacagagggagcccttgctgttctgttctgaaacttcaaacatgctgaccagtcacaattctaagtagatttcagtctgatttggaaaggctgcctgtgtatatatttgccattttataatcatattgctatccacagccaagctattaacaagcttaccttacaaacaatcatagtgctattaagttacataaaaccaaacacacggatgaataagcagtacatgtgatggtctctgagctctggcatccagtggttggtctgagacccttagtgcttctctctaaagtagctcctcatactaattacagcttaaatgttaaaacccaacttcatttgtaattcaaacccaatttgtgagaccttgctgagtgtctatatagttagtgttcctaagattcaaattagaaagagggggagattttgttgttgttgttgttgaattgagccagtattgtttgttatttggcacaggataggttaaaaatacacaactggaataataaaatcacactttaagaaggatacattatttgaatacttatatcaagaacaaccttaaatttagtgaaagattatatattaagactggattacctaaaggtattttgcctttaagacaggttttgagggcacatggtctgaatgagacactcagaattcatcattaatccaagtgaacagagctcatccttactgtttttttgttttgttttaatataaacaggctcagttttctcacattggtgcgtcccttcatgctagaactgcttatgtctacagagtccccgaagaagcgaaaatcttttttctagcactaaacatagcatatggagttcttcctcagctcttggcctaccgttgtacctacaatcccgagttcttcctaagaactaaggcagatgagaagttggaataaacaaacatacctcacagttctctctgacctgttaatgggactggcgctctcctttatcccctccatacaggaatactcacaagaacacacttgttctgcagcatacatgtgagtgaaactaagggtagtatctgggtatattctcagttttgaaagaaaattaaagttgagaaacagcttttttaaggaaatatatcaccatttgtctatgaatgtgaccattgattttagcattgtttgcacatagtatgtgtgaaaattacaactctagtgcctacaaaaagcataaaaatgaaactattcagaagtaactaaccatactcactatgcataagaaataattcaaaacagcaattgcaggttggagaaatggcttcatatgaaatgtatgagttgttgacaatcttaatataaatgccagatcatcacaatatttttaaattgattcaagtgttttcacaaggaaagcatattatttattgccattttaaaaattgctgtcaaaacttctattgtgaatttgaatagctaagatgacacaaatcaactttattagttgccttaatgaacacttgttttattggttgataatatttctcttgtgtttctgtgtataccttcaatactgtgtataccttcaataaaattatttttggtgtttatgaagataaactttattaattttgaagcattttatatatacattttcatgacaaattttgaactttttatttaagaaatctgtgccaggtagtggtagcacacgcctttaatccttgcacttgggattcagagacaggctgatcttttgagttccaggctagcctggtctacagagtgagttccaggataatcagggctacacagagaaaccctgcctcaaacaaacaaacaaacaaaaaaacctttgttatatgttccaatttaaaaatgctatctacattctccatatgttttgcatgataatgaagagatcttttgtcaaatttcattattttaaactaaaatatttaaaattaaaaagtaccttttaaagaaaaaaccctgacttaacagcctgtctcttaatgaattttccatacatggaactgcgtgagcacaacaggggaccactgattgctaaccggcaggagcaagcccaaaggacagtgatgtcctggagggaggggtgagtagaccagtgcatccagagccccacatcacctccatcttcacaacgacactgggctcttaggtcttcttctattttctcttcacgttcattagttcttcaacacagtaagaacaccaaaagcaaactggatgcacggaaggctgtgtgtaaatgcagggtcccctgagctgggctgtcgcagacgtgcagacagctcctgctgctgcagctcctgctgttgctccctcctgtccccccacggctttcacttaacctaacatccagaatacttaaaaagaaacatgatagaaaaaataaaattttcacctgcacttaattctaatgtcaatttgctgtcaatctttgctataatacaagaaacacattaatacttcacattacacatatgaagccaaataacactaactcggctgtttataacctcaaaccttactcccagtacacattccaataaatttattctgtaaaaacaatacatttttttgtttttgattttttttttacagtaaacttctcagctacaaacctcaaacacacacaaaagatcttccaaggacaagcatagcagggttgatgagacccaaactgactaatgagttctcacagtataagctggcataaaaataaataagactctatcaccacaagagcgacagtaatgcacacgtaacaatggttggcggatgaacgttaactactctaattctagttctaaaagaaaagtctattttaaactctgtactcaagagtcaatgctttgtttcccacagtgctcctgctgagctcagctttcagtgtaaagtgaccatcttgagggattggctcaaatcgtattggctttgggaaaaaaaataagtccttgctttattttggtatgacacaaaaagactcagtaagttcacatataaacttagtttgtggacacaggaacatgagttttgagaagtattaagtttcaactagctatttctaatacagaataggtattgtacatatggttaaactttacacatggccttaaaactgaaagatgactctaacttcatctccaatacaccaacagtatgtatctaggagttggttcttgggttctgctacaaagaaaatcccatcctgaagtattatgttgagcagtcacctaacaatatgaattactgtttagctgagtatctgatgatggtgggagagaggcaggaagctgatgacttggaaaaggagcctagacacagagaagtctgcaaaatcttcatcattcttagtgattaagggcaacttcatgcaaccaaataacataaaataaagtcaataaccttaaaagggttaaaatgtctctttttccttcaacagaacagagaggaatgtgactaatgcacacacatactggggctctgtcaatgacaacaaagaccgttggttcatatcaaatccaaatccaagaattagacaatcaaacagttaaccttcttgtggtgtctctcaatatgcagcattcattacggtagttaggtctgtaaaaaaaaaagcaaataaaacaagccttagatgagctaggacactaccgagggaagctcatcaccatcaccctgtgggcactgggttcttgtcctttgcagtctgagtcagcatcacagcagcagtacttaacgaaacagcgtcagaggctttgctttctatcaactaaacactgacacgctacgttagtatcctgttcaaaaccagacaaaccctaggggtaacctctgttgcctctccagtggaggaagctatggcagtagcacatgctgtaccactcaaggaggtgagtactgctgctgcccaccacactcctaagagaggtggtctgtctgaccggggtgagcagtataagctgaaggccatctgggtgcacgcagactgtccttcacaatacttgcaactttagttacttggggcacacatggtgcagcaaagtacagacgttaacaacttcagtatgtctagtctctgactttgcacttttgaagaaaaagaaaaaaaaaaaaaacaacagatgaaacaaaaccgtccagattttctttaaaacttatatggcatgcatatgacaaagataaaatattcctgctttgtaaaataattaaattcttaatttttatattttatcctttttaatatgtgtgtctatttgtctgtgtgtgtatgtgtatatgcacatgatagagtgaacatatgaaggtcagatcacaacttactggagtaggtcttctcttaccatgtagactctgggatcaagacttaggtcaagagggcagtggtggcgcacgcctttaatcccagcacttgggagacagaggcaggcagatttctgagttcgaggccagcctggtctacagagtgagttccaggacagccagggctacacagagaaaccctgtctcagaaaaccaaaccaaaacaaaccaaaaaagccttaggtcatcaggcttgggggtaagtcactttattcactgagccatcttataaacccaagaattacatctaaatttagatttcactttaaattatgtcaggttatatttccccaaagagatattatttttgttttctgtgtcattaacctaaatatattaaccacttctagttctcatgagatgagcaaaaaagggaactcaggccccaaatattttccccttaaaacagctttatcataaataactcaatcaacacacgtatgagcagatgttccctcttaagcaaagcctgttacactcaccctgtcaaatcacataggcctttcacaaggagaaaagctatcaagcttaccattcccacagaaaagaacatttaatttctctgtccctaccccaaacaaggagaatagtggatctttaaacttttaaaggcatatttacaacatttgaacttgagaaatataatgcctggtaactgatttatcagtaaatgaaacactaaccatatgattatactcacagatactctggaggactctttccttgggtaaatatgggtagatacccagataatgaaaatttgttaaagaaatctttaaaagtgtattttattaatattacgtgagaaaggcaataaattctttgtttactgtggcagaaaattcatttaacagctcaattcatattaaagaatagtttaaagcaaatccaacagtagactcggagtactgtcatgcagtgaggagatgatagtaccagtgtgaccactttaagagcacacctctttgttttaagtaaggcgctgttaaatgggttcttgtagaacaattgtagagtttatgacttttaaatgtctactataactactgtgattacatgtattaattttcaattcataatggtatctatagactggacacagaattctggatatctgctaggcctgatgcttccttgacctaaaagtcaatgggctgggtggtcattttctgtggtcaccttttgagctcttcgttggctatgttggctgacatctggaaaatgtcatcagagtctaccttgaggtattttaatgagagacacagtgaaagagcctctaggggacagcaaagctaatggatacccaaaatatggcaagcagaagccaaaaagatttttttcatatataccatttttatatgaaaagatttggtattatgattttgatatttggtgagttgagcagtgttgtgcaaatcaaaattacagtaagatctcatctcatgccagcaggaatagctatccatcatcaaaaaaacaagcatcaaacactggggaggatacaggtggcaaatggaagcttaacacactgttgggaaacaaattagcatagctattattatctgtatggagggccccaaaagactgaaaataagagctgggagcatggctctacaagtaaagtgcttgagcagcaagacctgaattcagatccctagcgcagtgcctatgtaaagcctggtataacagtatattggtaatgccagtgctcataagaggaaagcagagataggggaggcactagccagtcagcctagcaaaatctgtgagcatcaggtttactgagaaactgtcttcttcttttttttaaaagtggagaataatagaggattttcaatgttgccctctgaaatacacatgcataaaatttttttaaaaatcaataatgagacagaattattacagttcatatataccaatcctgaatatgtatatatgaagaaccaaggcagcatacagtagaggtacatgtacactcatgtctattgtagcacgtacgataagagcccagttatggaatcaggctgggtgtctatgagaggataaagataatgacagacagacagaaacacagacatgcacattcattttactcagttaaaagaaactatggtgtttgaagaaaaattattagaactagagaccattgtgttaaaacatataaacaagacttaggaagacaaagaaggcttgttttctctcacatacagattctagattggaaacagaaagagataagcaggaggtgggagtggacaaggaccaggatatgtgtgtgtgtgtatgtgtagttattaagttactatacactgataaaaaactttactattggcacttagtaaagaataaagtgacttctaattcataggaaaaaatatattatttgttgctagtgataaaatttgatgaagtgaaaattataatattaaatcctccatgtgacagcttcttgacatttaaagacttctaaaaaaacagagatatttagaaacctgattaaaatataataaaatacatcaatacatgaagcagtaaaccacaacaaagcagtagcgtaaagaagtaataaccagtatttgcaaacaagtgaaagctacctgagtgtcaagtagtctaagagactttactgaaccaaaacataaaaagttcagattctatcactgttaacatcagctgtcaacctgacacagcctagaattatctcagggtctcaactgagagactacccagatcaggttatctatggccatgtttgggagcaactgtcttggactgatgattgatgtggtagagcgcagcgcactgtggccagtgccatccctacacaggtggtcttgggctatataaggaagctagctgactacaaaccaatgggaaagccagtgagtgagccaacaaacaacattcccctgtcgtttcctcctcaagctcctgccttgcttgagttcctgccctgacatccctcaataacagactgtgacctgcaatgtaagccaaataaaccctctcctcctcaaggtgtttttggtcagtgtttgtcacaacaacagaaggaaactagacaagttcttaatgcaatgacctttaaggccctactatacacaagaactaaaagggctagagatgcggataaagaagtcatcctcacatgcagtgcagctgacagtcctcaaagtctcaccagagaattctcagaccacaaaaacaaaggatcaagatacaaagaccacatacagacatcaaaaacacttgctatacactgttgatgagaaccagagaaaaccatctcattgtaaaagaaagtaaaatgcccaggaataagtctaactaaggaagttgaagaccttcacgatgaaaactgaagacgctgaagaaagaaactggaaagaggagatggacggggttatcatgcttatggactggaaggatcaatacctgatcaaaaatacctcatacgtatgtgtgaaattctccataattttttaaacctgaataaagtgaagaaaaacataggcaaagtattttaaggcataagcacaggcaaggactttctaaaggcttcagcagcatgaaaaatatcacaaggaaattaaaatgctcctgttaaggtaaaggaaaagatgaaggaggaggtgagacaacctgttgtgttgtggggaataacctttgccaactctacattccccagagaattagtatctagaatgtatgagaaactgcagaaactgaacactaagaaattcaattaataaacatcttttggattctattgctagccaccccacccccactccttggcctcaacctcctttactgtattcaagatgaactgaactcccactgcttacttcagatgcacacccactagccccacgagctcaacaagtattctcatttcctaagtccgttcactctcctcctcctgtaagagactatttaaaactttgtcctttcctgtgaaacctcagcactctttcctgcaccccctcaagccatgaccttgtttccttggaaaacaagcaatcacacaagtgtttttataagcttgtatcccaagcaagcatccacatacctgcctttctgccctaatactgtcccatgatatgtactcatctcatgcttctctgctttctaaaggtcatggcactgttaactttttgttttgataaatcatatattgaagcattctatccagctcatgactaagtatctacagtacgtttaccatcaggccgtcagctttatgaagtatcgttactctttagaaagctactataacttagggtgggtgggtaattgaccaagggaacccaggagaacccagacagaaacttacagacaatctcagtaagaaggctgacatggttacccgtaaagacagaaactgctaaccacagaaagaaatgtgaacagctgaatataataaagttaacaaaatatggtttttttttaaagaaaaagaaagtgaacagataggacacaaacattctacagagtaagcgaagtcatataaaccagtaagaaaaaagtctaatggggcaataggtgaacaccctagaacttcgtatcataaaaaagaaacatggctgtttgatagaaacaaagcagaacaacttgacctcatcattgatcatactgcgttacaattcgtaacacaatgactactttacaccaatatgttgtcaaaaataaacgtcagataacaccaggttagctacaggggctttaatatgctgttggcctgagcataaactggccgactcctccataaagtaactgataaggctgaaagccaccgtcagttctggttacatacctaaaacacttgagcatgtacactaggagacaaaatgcttctaacaatactgtccaaagctggaaacaggctggatatccattaatagtagactcaataaattgtgttcacatagcgttatatataccatataaatgaaaacactgaaaactgataaagcctggcaagatggcactttctgctaagctcaaggtctgagctggatccccaggaataatgtgaagagtatggctcctcaaaaggtgtcctgggacctccatgcatggaccattgcaagctgtgactggcgcaccccaagaaataactttttttttttattaaccaaaagaataaaccttagaagcacagtggtgagtaaatgccatcattaaaaaaaactcattaacaaactgaacaatgttgacaagacagatctgtggccttttaaggaagtgtacctagacagatggaaggaagggttctgggagcctgagggaagcagaagagaatagtggctggtaaagaaagtcagaacaaactgcctaatgctaccaaatgctgcaagacagagcaagtgtcttgcaccctgcagacctgcactcaggagggttaagcttggggctatggatctgaggccagcctgagctacacggtgaggcagacagcggtatacacacagcaagaccttgtctcaaatactgagaggagggatgagggaggatgttgaggaaggctaacctgagtgacagggagtaagacaacactgaaaccaaannnnnnnnnnnnnnnnnnnnttagaagcacagtggtgagtaaatgccatcattaaaaaaaactcattaacaaactgaacaatgttgacaagacagatctgtggccttttaaggaagtgtacctagacagatggaaggaagggttctgggagcctgagggaagcagaagagaatagtggctggtaaagaaagtcagaacaaactgcctaatgctaccaaatgctgcaagacagagcaagtgtcttgcaccctgcagacctgcactcaggagggttaagcttggggctatggatctgaggccagcctgagctacacggtgaggcagacagcggtatacacacagcaagaccttgtctcaaatactgagaggagggatgaggaggatgttgaggaaggttaacctgagtgacaggagtaagacaacactgaaaccaaacttcaagagaaatgacggagaaatgagatgaaagaagacagagctgagaggcacgggactgatatgaacaggtaagaacagacacaatcagagcccaacgcagagtaacaatgtacctggtgggcatcaccattcacccactcattccatcactgtaagcaagagtcaatccttaggccagcgctctgcgctcaagtgctcagccttcatgggtcattatgtgaagacgaggagtgtacaaagaagaaatgctatgggaaatgcctatgtgcacaaatgaccgttaccacactatgaatgcggacctgcctgtaaatgcctaagtcaagagcatttaacaagagtcaaggtaagtaaatctgtccctatgggtattttaaatatcagtgcttagatagagcttgactcctactcctgtaggtctcatgttttgtgcactatggaaggtttacctttgctattcaagtacttatttctctgccctcatatcatacctggacatggcattgcgatgcttataccaagaatctcctgttaagtttgtgtaaacattcttaccattattctctgccgtgtcaataaatgctgatcacccaatgtctgggcaggagagagactagggtgggacatttgcagcgaagaggggcggggagaggagaccagcagcagatggagggatctgagccaccgaggaggaggggtcagaagagccagattagcaggggagctaaaggcaatcatttaattgctcagtgattgaaacaagctttgaataaatcttatctcttctgtgtgattattggggaatagcataaggtaaagaaatatagctgccttattaattcatccttaatatttatcttaaggatacttcatttacatattctattttggacatgccatcgactttgtaataaaagaaacagaattgtagccaggcgtggtggtgcacgcctttaatcccagcacttgggaggcagaggcaggcagacttctgagttcgagtcctgcctggtctacaaagtgagttccagggacagccagggctatnnnnnnnnnnnnnnnnnnnnctggcaagatggcactttctgctaagctcaaggtctgagctggatcccccaggaataatgtgaagagtatggctcctcaaaaggtgtccctgggacctcccatgcatggaccattgcaagctgtgactggcgcaccccaagaaataacttttttttttattaaccaaaagaataaaccttagaagcacagtggtgagtaaatgccatcattaaaaaaaactcattaacaaactgaacaatgttgacaagacagatctgtggccttttaaggaagtgtacctagacagatggaaggagggttctgggagcctgagggaagcagaagagaatagtggctggtaaagaaagtcagaacaaactgcctaatgctaccaaatgctgcaagacagagcaagtgtcttgcaccctgcagacctgcactcaggagggttaagcttggggctatggatctgaggccagcctgagctacacggtgaggcagacagcggtatacacacagcaagaccttgtctcaaatactgagaggagggatgaggaggatgttgaggaaggctaacctgagtgacaggagtaagacaacactgaaaccaaacttcaagagactggacatggcattgcgatgcttataccaagaatctcctgttaagtttgtgtaaacattcttaccatttattctctgccgtgtcaataaatgctgatcacccaatgtctgggcaggagagagactagggtgggacatttgcagcgaagaggggcggggagaggagaccagcagcagatggagggatctgagccaccgaggaggaggggtcagaagagccagattagcaggggagctaaaggcaatcatttaattgctcagtgattgaaacaagctttgaataaatcttatctcttctgtgtgattattggggaatagcataaggtaaagaaatatagctgccttattaattcatccttaatatttatcttaaggatacttcatttacatattctattttggacatgccatcgactttgtaannnnnnnnnnnnnnnnnnnnggagaggagaccagcagca

SEQ ID NO: 3400 - DNA, 3061 bp, Mus musculus
tcagcccagctccgttccagctcgaggatgcccagctcccatctgtgacccgcgtccttcgccgggcccttccttttcccattaaagcaagcgtcctggggcgcttgtctcctcgcggtggctgctgagcccttgcgttcgttagcaggagcctggtggggacgcctctggggatcgtacagcggccctagagcacccgggtggtgcctctctctgtgcgcgccgggcagctacgggcgacggggacgcgcagaggagacgcggccgggggccgcctggaagggcagcggcgaggggcgcggcgccgccggaagctgagccaggggacccccggcgcgatgcggtgaaagaagagcgacccggaggtggcaatgagtgcctctgcggccacgggggtttttgtgctgtccctctcagccatcccggtcacctacatcttcaaccacctggcggcccagcacgattcctggaccattgttggggttgctgccctcatcctgctcctggtggcccttttggcccgggtccttgtcagaagaaaaccaccgagggaccctctgttctacgtgtatgcagtgtttggatttaccagtgtggtgaaccttatcataggcttggagcaagatggcatcattgatggattcatgacgcactacttgagagagggtgaaccgtatctgaacacggcctatgggcacatgatctgctactgggatggctctgttcattacctgatgtacctagtgatggtggccgccatagcctgggaggaaagctacagaaccattggcctatactgggtcggatccattataatgagcatcgtggtttttgtgcctggaaacatcgtaggaaagtatgggacacggatttgccctgcatttttcttaagcataccatatacatgtcttccggtctgggctggcttcagaatctataatcaaccatcagaaaactataattatccctcaaaggttcttcaagaagcccaagcaaaggccctgctgagaagaccgtttgacttagtgttggttgtgtgtcttttcttggcaactggattttgcctgttcagaggcttgattgctttggattgcccagctgagctctgccgactctacacgcagtttcaagagccctacctaaaggaccctgctgcttatcctaagattcagatgctggcatacatgttctattccgtcccttactttgtgattgccctttatggcttagtggtccctggatgctcatggatgcctgatataacgctggtccatgctggaggtctagctcaggctcagttttctcacattggtgcgtcccttcatgctagaactgcttatgtctacagagtccccgaagaagcgaaaatcttttttctagcactaaacatagcatatggagttcttcctcagctcttggcctaccgttgtacctacaatcccgagttcttcctaagaactaaggcagatgagaagttggaataaacaaacatacctcacagttctctctgacctgttaatgggactggcgctctcctttatcccctccatacaggaatactcacaagaacacacttgttctgcagcatacatgtgagtgaaactaagggtagtatctgggtatattctcagttttgaaagaaaattaaagttgagaaacagcttttttaaggaaatatatcaccatttgtctatgaatgtgaccattgattttagcattgtttgcacatagtatgtgtgaaaattacaactctagtgcctacaaaaagcataaaaatgaaactattcagaagtaactaaccatactcactatgcataagaaataattcaaaacagcaattgcaggttggagaaatggcttcatatgaaatgtatgagttgttgacaatcttaatataaatgccagatcatcacaatatttttaaattgattcaagtgttttcacaaggaaagcatattatttattgccattttaaaaattgctgtcaaaacttctattgtgaatttgaatagctaagatgacacaaatcaactttattagttgccttaatgaacacttgttttattggttgataatatttctcttgtgtttctgtgtataccttcaatactgtgtataccttcaataaaattatttttggtgtttatgaagataaactttattaattttgaagcattttatatatacattttcatgacaaattttgaactttttatttaagaaatctgtgccaggtagtggtagcacacgcctttaatccttgcacttgggattcagagacaggctgatcttttgagttccaggctagcctggtctacagagtgagttccaggataatcagggctacacagagaaaccctgcctcaaacaaacaaacaaacaaaaaaacctttgttatatgttccaatttaaaaatgctatctacattctccatatgttttgcatgataatgaagagatcttttgtcaaatttcattattttaaactaaaatatttaaaattaaaaagtaccttttaaagaaaaaaccctgacttaacagcctgtctcttaatgaattttccatacatggaactgcgtgagcacaacaggggaccactgattgctaaccggcaggagcaagcccaaaggacagtgatgtcctggagggaggggtgagtagaccagtgcatccagagccccacatcacctccatcttcacaacgacactgggctcttaggtcttcttctattttctcttcacgttcattagttcttcaacacagtaagaacaccaaaagcaaactggatgcacggaaggctgtgtgtaaatgcagggtcccctgagctgggctgtcgcagacgtgcagacagctcctgctgctgcagctcctgctgttgctccctcctgtccccccacggctttcacttaacctaacatccagaatacttaaaaagaaacatgatagaaaaaataaaattttcacctgcacttaattctaatgtcaatttgctgtcaatctttgctataatacaagaaacacattaatacttcacattacacatatgaagccaaataacact

SEQ ID NO: 3401 - protein, 366 aa, Mus musculus
MSASAATGVFVLSLSAIPVTYIFNHLAAQHDSWTIVGVAALILLLVLARVLVRRKPPRDPLFYVYAVFGFTSVVNLIIGLEQDGIIDGFMTHYLREGEPYLNTAYGHMICYWDGSVHYLMYLVMVAAIAWEESYRTIGWVGSIIMSIVVFVPGNIVGKYGTRICPAFFLSIPYTCLPVWAGFRIYNQPSENYNYPSKVLQEAQAKALLRRPFDLVLVVCLFLATGFCLFRGLIALDCPAELCRLYTQFQEPYLKDPAAYPKIQMLAYMFYSVPYFVIALYGLVVPGCSWMPDITLVHAGGLAQAQFSHIGASLHARTAYVYRVPEEAKIFFLALNIAYGVLPQLLAYRCTYNPEFFLRTKADEKLE

SEQ ID NO: 3402 - DNA, 649 bp, Mus musculus
tgttcgtctggagtctctctgaggccagtaaagttcctggaccattgttggggttgctgccctcatcctgctcctggtggcccttttggcccgggtccttgtcagaagaaaaccaccgagggaccctctgttctacgtgtatgcagtgtttggatttaccagtgtggtgaaccttatcataggcttggagcaagatggcatcattgatggattcatgacgcactacttgagagagggtgaaccgtatctgaacacggcctatgggcacatgatctgctactgggatggctctgttcattacctgatgtacctagtgatggtggccgccatagcctgggaggaaagctacagaaccattggcctatactgggtcggatccattataatgagcatcgtggtttttgtgcctggaaacatcgtaggaaagtatgggacacggatttgccctgcatttttcttaagcataccatatacatgtcttccggtctgggctggcttcagaatctataatcaaccatcagaaaactataattatccctcaaaggttcttcaagaagcccaagcaaaggccctgctgagaagaccgtttgacttagtgttggttgtgtgtcttttcttggcaactggattttgcctgttcagaggcttg

SEQ ID NO: 3403 - protein, 202 aa, Mus musculus
SSWTIVGVAALILLLVLARVLVRRKPPRDPLFYVYAVFGFTSVVNLIIGLEQDGIIDGFMTHYLREGEPYLNTAYGHMICYWDGSVHYLMYLVMVAAIAWEESYRTIGWVGSIIMSIVVFVPGNIVGKYGTRICPAFFLSIPYTCLPVWAGFRIYNQPSENYNYPSKVLQEAQAKALLRRPFDLVLVVCLFLATGFCLFRGL

SEQ ID NO: 3404 - DNA, 51636 bp, Homo sapiens
  misc_feature (1)...(51636): n = A, C, G, or T/U
tggggcctatcaaaagatagaaacccttttaggttgtctgaaggagaagcaaacagtcaggttagagacattcacagtagttcaagtgggctttaccctccactgaggggtagatctctttagtatttcaaactggggtctacttcattctcaagccctataccccgcttcaaacactccatgagccaccctgggcaacataacaagatctcgtctctacaaaaaattagccaggtgtggtggtgcaagtctgtagtccaagaccctggaggctgaagtgggaggatcacttcaactcagaaatctgaagctgcagtgagctatgactgcacaactgtactccagcctgggtgacagagcaagaccctgtctctaaaacaacaaaaaacactccttaggaagtttgcccactttctttaaaaagcagttttcctgattaatcttgagtgtgaaagccattgcttctagttactacatgttcatgcacagaagagggtaagagctgactatctgagctattctcagtgctgttcctgaatgatcatccaaagtctccgtctactctttgcatttgttgattctgagcttggacctatctcccctaggaagaattctggtgcttcagtcttaatcctctattctttctccattgctgttttgtatttttcagttatctactgctgcataaccaccccaaaatttagtggcttaaaacatttaaaaaagtatcatttctcatgtgggttgattatgcagttgttttgctttatttggtgttgaaaggttcatgacatcctcccatggctaatttttagtgatacctactggctgggatctcaattcaggttgtcagccagggaccttagttcttctccatgttagcctttctacatggctggttgagcttcctgacagcatggtggcttaggttccaagaaggtgcattctaagaggattaaaccctaatgtacaagcagttttataagcctctgcttacatttcctaatgtctcactggccaaaacaaactacatagccaagttcacagtcaagtggtaggagagatgctgtttattaggggcacccaaagtaacagcacaatattctatgtatccttcacattttctggttcactagtagaaccctttcctgttttcaagtactgtgttttttcttctttaaaaaataaaacagagctgagattggtggtgcacacttgtagtcccagatactcaggaggctgagataggagcattgcttgagcccaagagatcaaggtcagcctggtaaacatagcaagaccctgtctctaaaagaaaaaaaaaaatgtgtgtgtgcatgtatgtgtatgtatgagagatacatacccaggaacagtctagatactacaacaacactgggttttgatttagttcttactctaattcaccttttccatacagaatgtcaaattatccatttctttgcttatcaaaccattacattttatccttacttatcaatacataatatttcttctttcttgccagccactgtaactgcacacttcctcttgcctcatttgtattcaagctttattatatgaaataatattcatagagcattgcttgaaggatattcaccaattccctttgatcagagctggcagatagattcaagttggcatgggagaagaaccctattaatgagtacggttggaaaggattatgaggcaacgtccagtctcaacgggaaaaagttcagtgatcatttggtgacgtttgtcctgggcttggactagaaatgatggtgtgggtgccaggaaggcattttcatcccttttcccagatattgtaaaatgtatcactgaaaacaagccagaacttcagaaagttgcttttctgtatgtaattgttttgaccacttgagtgtcctgagtggcacttgacaatatgccaatcacctgccttgaggatgttctgggagacaattgttcagagtttgattctatatttattgcagaaatgttgctgaggataaactatatgacatggtgttccctttaagaagagccagggaagagtttttctgagcaacagatctgtttttatcttatggacactgtgaatgttacaactgattatgtttccctccttgctttggttgctaggaaacccaggacaaaattgcagacctcctctggcaactgcacaagacctttgaaaaacatttgacatgctaactttacctctcctgtcattttattttcatatcactttttctttagaactccttccttccctctcgatttccttccatcctttcccccgttttctttcttcatctctcctttcccctcctcagttaacattaattgtgcatctgctgtatgcctggcaccatgtttaggggttggacgcacagccacctttacccccaccccccttcaaacccacgttaataattgcagccctagtcacagcactcggggttgctggaaagacttagggagatacatgcaccgagggattcttccagagttttttttcaggtgggctgggccctccctggtttcttcttcagagaggattctagtgacctacacactaagcacatcacccttgccctggtctctctcagatcatttgttctgtccctatacaccccatagatcaatctgtttaattgcctcttgcacattcatctagagtgggtagcctttcatgagtacacaaatacaacttttatcaaaaagattttttgaaaaaggagaatggaagcatgtgatgaagggaagagaatgaatgttcaggagctgggggctaaagcatgaaagctgacttccacttaacttttcctgaagatcattaatctgcccagccccactcttccattgttcctgcttccaatgtgaccaagctcctcaaagttctgctttcacttcccctctgtggcagaaacaggcatggtaaggtgggggctttgcatttaattcctgattagtcagttaagtcagtgattttgaatctgcattacaaaacactgtgtgtttctcaggtaattggcattgtacagcctctatgtttctatttttgcttccaggaagcttggagtcaaattcgatgcttcgtcacagctgcaatattagccttcatggcttgcaagattgatgctccttaaaaagcagaaaacaaaaatcaaaaaacatctttattgtttgaatgacttttttttttcttttgagatggagtctttcttgctctgttgcccagtttggtgtgcagtgggtatgatcttggctcactgcaacctcggcttccagggttcaagcaattttcatgcctcagcctcccaagtagctgggattacaggtgtgtgccaccatgcccagctaatatttgtatttttagtagagataggatttcaccatgttggccaggctggtctcgaactcctgacctcaactgatctgcccacctgggccttccaaagtgctggggttacaggcgtgagccaccacacccagcctgaatgcctttttaaaaagccatatacaaccctttttcaaacaatgattttgaaattgacctacactgagcagaacttcagaccttaatctcctgggcaatgagtcaaatgatcaaatcaaagcgtgtccaaacaccattgtctaaggtgctgggcatggagctttgctgggggtcagctgtgatatcatgagtctagctactttaagtcagaagatgtgaattcaagtttgccctgtgtcttcttagacacttgaatttggcaagtcatctaacttctttcagccccagtttcttcatccataaatggctctatgttcttcagacagctgttgtgaggattacaggagatagaattgatggaattactgtttaatctacagaatactatattgtcacaaaatcggattatatttgttgggtttatgacttaccccaaaacccagggaagtttcctgtaaaactgaaaacttcttcccaactgcaagccttccgaccactcatattttcagcgttaagagaaacttgtcaacaaaaatcatgtagtctccaatacgcacatcacaatacctcaaacactgccatgtcacttgggtcccttgtgggctgtaagggagcagctctcagtgttgggctgttggatgtttctgttattgagttcagatgcccatggctgttctgctggtggcaaggctcaccgacccctctgaagtggcttctgttcaccattctctttggctctctccttttcctgggacattgattcatttcctttgttttaagccccacctcttgctaatgacccccaaactctctgtagcttgtgcctctcttggtgccacagatgagtatccaaacagttgacagctcttcctgggagcccctgggtactgaaaaacccacatgtccacaaccaaaatcacctctagtgccctcctcccagccgtctccaattcctatctagatctttcacacctgtgtcctcctcttctcctcttccctctcactgccattgccttggttcagggcccatcctctcttgccaggacaattgtaggagcctcctaattgttctttctgcctcctatccctcttccttgtaaaccatggtccatgccagctaccagacagagctttaaagatgctactctgatcaagtccatccctcctcccacttatacggtttattttttatttttcagagatgaggtctcattctgttgcccaagctggaatgcagtagcacaatcatggttcactgcagcctcgacctcctgggctcaagtaatcctcccacctcagcctccagagtagctgggactatagatgtgtgccaccacacctggctaattttttggcgggggggtaaagatggggtctcattatgttgcccaggctagtctccaactcctggcctcaagtgatcctcccccctcagcctcccaaagtactggccaccatgcccagcctcatatacaaataatttaagattcataatcttttctgatattgagcccctgatccctctccatcttcacctcctgccagccccactcacacacgacatcccagtatttccaaccagcgcaaattacttgcacttcataaagtggcaagctctcccacacatttctttctgcctttaacatgttttggctctgttgcctggaaagcccaacctcttctgtgtctgtttggccagcttctacttgttcttcaaggctagtctaaagcctcacttccttctgaggcttttcttggatccttcagaccaaatttgctgtttcctatagcaattggcttatatattttttattgcattatatggtaattgtttacatgtctttctcatactagtctgtggtcctcttgggcaatttgtaattcatctttgtatgctcacttcttagaataatgacggaaacacagcagactgtctgaggatgtttgttgataaaatgaattgattagtgatgtaattatcatatctatttttacaatagtagcgagcacaactgaagccaggtcagtatgacaggaggggtaagtctagagctgccatgtccagtacagaagccactagccacatgtggctgttgggcacttgaaataagactagtctgagttgagatgtgctatgtcaaatacacatgggattttgaagactcagaatgaaaaagattataaactatctcattaatatatttcatgttgataacttgttgaaatgataatcttttggatatactgggctaaataaaatatattataaattaattttactgtttctttaaaactttttgatgtggctacaagaatatttaaaattatacatgtggctgggcgcggtggctcacgcctgtaatcccagcactttgggaggccgagttgggcagatcacttgaggtcaggaattcaagaccagcctgggcaacatagagaaaccccatctcactaaaaatacaaaaaattagctgggtgtggtggcgcacacctgtaatcccagttacttgggaggctgatgcacgagaattgcttgaaccagggaggcggaggctgcagtgagccgagatcgcaccactgcgctctagcctgggcagcagagtgagattaggtcttgaaaaaaaattaataaataaaaataaaataatacatgcggctcacatttgggctcacagtatatttctgttgagcaataatgatctagagcattcaatcactgaacaaatatttctttctttttcttttttttttttttttgaggcagagtcttgctctatcacccacgctggagtgcagtggcatgatctctgctcactgcaacctctgcctcctgggttcaagtgattcttgtgcctcagccttctgagtagctgggactacaggcacacatcaccatgcccgactaatttttgtatttttagtagagatagggtttcaccatgttgcctaggctggtctcaaactcctgacctcaagtgatctgtctgcctcggcctcccaacgtgctgagattacaggctgaagcactgtgcctggcttgcaaatatttcttgagcacctcctatgtactgggcattaatctagatgatgggaatggaacaatgaacgagccagagaaggttcccaacctcgaggagcttccattatcatggaggagagatccagaccagtaaacaaaggcgtaagccagataattttagatagtaaaagtactctgaatcaaataaagcagggcgcttgataggcgaaagttcaggagggtggtcaggtaaggccttctacagcagctgagtcaactgaggtcagaggcaggaatcagagggaggagactaggacatgtttagatgagaggcagtatagaccaaaactaagaggaggtgcggatggggaggagcaaacagacttgagtgatatttggaaagtcacactgggagaattgtgtaacaaaaggaattccggagaggtgggaactgatggctcccaggcttctggcttgggtgagtgggcgaattgtggtgccaccagataaaataaagcaggagtgtgtcttgaggaaatgaggaattctgttttgacattgtgaggtgccaccgggatgcccaggcagccatgctaagggaataacaggtcagggcttgttatttgggatctagcatcatagatgtggccattaaaaccaagtgtgtctgagaaagaaacaagagaagatggtaggcaaaagaggacactcagggccaggtgtggtggttcacacctgtaatcccagcactttgggagatggaggcgggtggatcacctgagttcaggagtttgagaccagcccggccaacatgatgaaaccccatctatactaaaaatacaaaaattagccgggtatggtggcgggcacctgtaatcctagttccttgggaggctgaggcagaattgcttgaacccggcggggggcagggcagaggttgcagtgagctgagattgtgccacttcactccagcctgagtgaaagagcgagactttgtctcaaaaacaaacaaacaaacaaaaaacaaacaaacaaaaaaaacccaggacactcaggttcagggagcagatttctaaattggaagctacttgagcctgtgtctaggttgagcggaaggatccagggcagccagaggggttcacttatcccaaaagccagggaaggttcctgcgaaaaactcttcccaactacaagcattctgaccactcatattttcagcattaagagagaaactggccgggcgcggtggctcacgcctgtaatcccagcactttgggaggccgaggcgggcggatcacgaggtcaggagatcgagaccatcccggctaaaacggtgaaaccccgtctctactaaaaatacaaaaaattagccgggcgtagtggcgggcgcctgtagtcccagctacttgggaggctgaggcaggagaatggcgtgaacccgggaggcggagcttgcagtgagccgagatcccgccactgcannnnnnnnnnnnnnnnnnnnaaaaaaaaaaaaaaaaaaaaaaagagaaactgttgtcaacaaaaaaatcatgtaattcccaatatgtatatcacaataccttgaaactttgccatgtcacttgggtcccttgtgggctctgagggagcagctctgagactgatgcaacaaggttgggtgttgatggaagggatgggctggcttgggagcctggctgggagctcagaggtataggaggaagtgtctcttgtcagggaggaagtaggagtttaaggagagtggtgaaggttaggggtggaagagggtgatgtgcaggtgacaggtgaggacacctcttggagaaactttggatatgtcacagtgtgggccaaggcttaaacgttatgcactcagagctggagaagccttcaagaagaactaggatgaaggattaggagaactggcatttgaaaagtggagtggccctggagcaggccatacctcctcgtagctcattttcctcatgtctaaaatgagccaaatggtcttttagaggctaggtgcggtggctcacacctgtaatcccagcactttgggaggccgaggagggaggatcacttgagcccaggagtttgagaccagcttgggcaacatagtgagaccctgcctctacaaagaagtggtgcgagactgtagtcccaggagctaaggaggctaagctgggaggatggcttggcgtgggaaagtggggactgcagtgagccctcatctctccactgcctctagcctggtttgcagagtgagaccctgtcttaaaaaaataaaaataaaaataggctgggcgcggtggctcacgcctgtaatcccagcactttgggaggccgaggcgggcggatcacgaggtcaggagatcaagaccacggtgaaaccccgtctctactaaaaatacaaaaaattagcccggcgcggtggcgggcacctgtagtcccagctactctggaggctgaggcagaatggcgtgaaccccgggaggtggagcttgcagtgagccaagattgcaccactgcactccagcctgggtgacagagcgagactctgtctcaaaaaaaaaaaaaaataaaaataataaataaataaataaataaataaataaaataaacccctcaaatggcaacagcaaaaacacataaatggtctcttaaattccctggaagttgtaaagacagtaagtacatgccggtacctccctcagttgcttgagctgttctcctggaactcactgcccttcagatagccacaacacttgacacacaatattttccatacccgtaggcatctatcattcagaggaagaggcttatcttccagtctttgtaccctgcagggcccaatgcaggctggctggtgggcacctggcctccaggaatgcttcctggaatagcaatgaatggcgctctagtctcttagagtctcagcatttatgtccatttcaattaaagaaaaaaaaaaaaaaagaatcgcaggaggtggtgtagtgagcagcacaggataacgcgcttcgtaggtatgaactcagttaaccccacagtcacactatgaagtgtgttatccccatttcccagataagggaaaagacagagaggttaagtaatttgaccaaagtcaacagctggtgagtggagagccaggtttaaaaaccggatgccggctccgtgcagcagcccgccgatggctactggagcggagaggttccgaggtttcaggggcattttgtcctttcccacttctgggccgtgggctcccccatagacgatcccgcgggcccttcctcctctgacaccctcggatctggttccacctttcccggaccgcagctcagccccgcgcctctccagctcttcgatgaccggttcccggccgtgccccgggccctccctcggagcgcgcgccgccaggggcacctgtccctgcgcgggggtgtcgccgcccctcggcgccgccgggcgcttgccgctgagccgtggcgcccctggcaggagcactgcaaggacgcctcccgggactgcaccgcggccctgcgcacttggggcgacggggccaggcgcgggggacggctgcgggctgggagggcgcgcggaggagacaccgctgaggggacgccgctgagggcgccacgcggggggcgcggctgaggcgcctcgaagggcaagcgccaagggggcgcgggcgccgccggaagctggggcggggcgcccagcgggatgcggtgaagggcgagcggcgcggcggctgcgatgagtgcctctgcggccaccggggtcttcgtgctgtccctctcggccatcccggtcacctatgtcttcaaccacctggcggcccagcatgagtgagtgagccggcgcggcgggggtcgcgccgaggggcggcgggagttggctcgccgcgacgggagcctcgcaacttttccgagggggctgggaccgtccgccgcgggacagaggttcgtggccgcaggggctccccgcgcctggccagactaggggggcgccccaggggtcgcacgggccgggtcttggagccgggccctgaggtgcccaggctggcgcatttcgggatgttggtgccagcaccgcgccaggtgcccggggtcacaggcgtcaatacggccatgcccctgccctggaggggcccaggggccggtggggagcggaacaaacacggacactacgaacctggccgtgtcagctcgtttgtgccttgttctttttgcatctcacgggaacgtttccatgtatggactttcgcatacttatcatttcttattaattttagaaactgttgtgaatgactagcagaaatagcccggaaccaacaggcagagacgtgggttctaggcctggctttggcactgacggtgtctggcctgacggtgtttggcactgacggtgtggtctggcctcggttttccggtcaagtggactttgtgtgcgtcctattgtaaggttccaccgagacctctttgtgaaggggcgttgtgaatggagaagtgcttcccagtgcctgcgctggggtaggatggggacaggcagcagaggcagaacacttcaatgtgaaggaaatgggtggggctgatggagggggacagggcttgggttcgaagccctgcctcccactccactgcagggatcacggactaacctgcagccggcagctgaaggcctgagggtcgccgggtgttgggacaggcgccagcctctgttcctgctgatgttggttgctgtctggagggaggaggaagtaacctgctatgtctctcagctgttggtgctaaggaaattgcatcagtctgtaggctgcaaacccccttcagctggtcaggccgtggagtgtctgtacatagggtggtaacttcctcctctccagctgcctggccgcctgatacaggcagcacccacactgagtgctcaccaggcaccagcagtgtctacccttggtctggcccagtctctggaggcatcccctggaggcagctgctctgggccaccgaatattacatgcctgtcaatatagtgcatgggggaccctgtgctccaaaaaatggcattacgggtagttcagtgaagatatactgagtgcctactgtgtgtttggcactgttccaagtgttggtgacatagctatgaacaagccagaagaggctgtggaggcaggtaatgagatagacatcaacaaacattaatacatcgatagtgacatgctatgaagataataaaatagggtgactggggagggggctggtggccagggaaggcttctaggaggaggtaacacttgagctatgggaagatctgggaatggagcctgtcgggcaggaaaatggagcagtgcaggggaaggaattggatgggcgtagtaggtattttggaaggtgaacagatggggcttactgaagagggttgcatggcagcagaggatttgaggatgagccctaggttttggcctcagccactgggaagatggtgatggcatttactgaatacagactgaactatgtattgctgtgcatgatggagcgcactggcaagcactacagcattttgaataattagtgtcagccattcttcctgtcctcttgcaggttaaaacccccgtggcctttgattcctctcttctttctccactcccttcctcctactgtctgcttccccataagtcctggggctctagtgtctgttccctcctttcagttctccctggcactggccctttctgacctggactgtggcaaaggctccggtgcaagtctcgctgcccagccccgctgcgtgtttctcggcctcggccccccagtcccagcccacgcactagtgctcctgccgcaccagcctgcctttgctccttgaccattcctcctcctctccagcctctagcccggactcctgctgctccctgacagggatgctgccttcctcctatcgcagactgttgaagccgcacctggactttatggccacttctaccttctgcagaccctccctctctctcctttgagctccctcagtcccttgtttgcacctttctcccgagagttactttcctgtggtaagaacttacctgccccggctatagctcacccctctgtactgtcctgcccaggccagcgccgtgtgcatcgtaggcactcaggtatgtttgactttgttgaatcgagtttccttcccaccaaaccttttatgcaactctgaaaaccagaaaaagaaaattagattgagaggtcaggaaaggattgagcgtgttctgtctccctctctcactgagagagacacactgctcacactcatccttgcatgtcccctctcagtaggtgtctgttcatagaagggcatcagcagcccttcccaccccccaagactagcaactttctcatcctggggttagtcgcagcccttacctgtccctgagtccctgcaggacctgtttcttcctgtggtgagcaggtcctgcacttggctgttgtaggagggtctctggggacagtgccaagagtcagagacaatctgctgccctagtttcccttcattcttccctcctctcctggagctaagagcatgagaggacgctgtgaaccagttcacactgctctgtcctgctccagaagagcaccaaccacgcgatcctgctggcagtgagtgcaggcccttggtaggagtgaagactggagttgtcacctgaccaccacctgcctcaggctgttcaccattaaaatgcctgtcagctgacccagcacacccacctcttccctcatgggattcttcagcccagcatcatactcttgacccacactggcttcctccttcttcagctcatccccacaggaggagcctggagcaaccactgaagtgcaatcaccagaaacctcctatttttcagtttctcacctggacattgaaacagccaccctcattcttttttaaaaaatgtaattaattgttattattttttgagacggactcttgctctgtcatccaagcgggactgcagtggtgcaatcttggctcactgcagcctccaacccccaggttcaagcaattctactgcctcagcctcccaagtagcggggattacaggcatccgccacctcgcctggctaattttttgtatttttagtagagacggggtttcaccatgttggccaggctggtctccaactcctgacctcgggtgatccacccgcctcgacctcccaaagtgcttggattacaggtgtgagccactgcgcccggcctcattcttatcatagaattgatccatctatcatttatccatccatcctccatacattcacccatactccatccatccactcatcatcatctatccatccatttatccatcatcctccatcatccatcaattcatccatcatccatccatccatttatccatcatcctccatcatccatcaattcatccatcatccatccatctattcacccatcatccacccattcacccatcatccatccatccattcatccatcatctatccattcatccatcatctatccatcctttcatccatcatccatccaaccattcacccatcatccatccatctatccatccactcatcgtctatttgttccccccttccctccctccttctattcttatctttctctctcctaggggacggtgatagttatccaaaggtcccgatgttgggctgtggtggtgtggaggggtctcagttgaggagtggtgcttgtagctgctccaatctgaagaggtcctggtgtagcaggccattggagtgggccaggtagtattttgtctagaattggaagccctgtcagtgctggaggtgtgagagggagagtattgctgttggactgcaggagaactcctagtgggtagagctcagagtccattgagataggttcctccatgtaggcagggacttctcttatttatccagtctcctagggcctgcaacaatggctaccacataggggtgcagaatacatttttttgcttgctatgtttttgaattaattaataaacagatagatgcaatgatgtgactttcctagggtgacacagttagcaacagaatgggtaccaggatcccggtttcctgactgataactctaccaagcctcgtgccctatcgctgccccactgagtagcggctttggcccctgctgtccttggtgccactccctttcctgtagaacatccaggggatgtactcaactaagcttcaccttggtttctatggtttggggttggatgctggtctgttggccctggttctggggtgttgggctatcttcattctggcctcaggtctagtccagactccttctccatggatttcctggcctcattctctggcccatttgactatacacataacataaggtctttcttgtcccctggaaggcatgtttagttgtaatgcctatatattccttggagctcagtctgagggtttctgactggccctgagggaggtggcagagtcagtggtgaggcctgtcagctgctagggagcaggggttagaggaacgtgtaagtggaggcagtggggcagtggccataggtgcagcagggtggggtgaggcagagggagctccagacgtgtcatctgtgcacatgagacaggataagaggagaatgaggaggacctgatggcttcggtccctgaaagtcatgggctgcagcccagatgggccaaagagctgcagataaacttcactaactctacagtgctgggagctgcaggcagaggcagaattatggatgaattatgcagcactaggagggaatgcattcaatagtcaggaaattccaggcaccaatgtgtttattttgatagtgaccacctccctgttctggtcgttgcagttcctggactattgtaggggttgctgccctcatcctgttcctggtagcactgctggctcgtgtcctcgtcaaaagaaaaccaccccgggacccactgttctatggtacgtctccacaaagggaaatcttttgtatctgattaataacacaatactttcagcctcagtcacatattcctccttggttgtgaatactctgagccctttggtaacagtggctgcaagtgtaggggtgtttcaggacaatctggccctcgcctctggctattgcctctcaggcagtggactccaccctctcccaggtggcatcccggtggagagttactgccaggccaggcagggcaccctgccaaccccagcatgctttgacctctgacctctgacctcgactctcatgctagctccttcctgggcttcctgtcttcagcctgctactagcagtcccccccacttagtgcagaacttaactgtgtggtgtctgggtctgcacatatgcatgaagaggaaaataatggaacctgccatagagacaagcacctatagtgcaccttgtatgaccctgagcactttagcagcaggctttcacctaatcctcaccatccctccacttgaaagtgaagcagctggcttggagatgctaagaaatgtggcaaaggtcgtgtggctgttgacccctaaagcccatgcccttccatcatgcatgctgccccagccaagctgctaccggcctttgagcacttcctgtgccaggtaccttgctgggcattttgttctgtagtttctgcttcagtaatgctgcatatcaaatgcaccccaagtcctacagcaacaaacatttatttttcttgctcacaggtctgtgggttggggccactctgcatcaggctgtgggttgatttcagggctgttctctgactccttgttcttggaccagcagctcccaggcatgcccttctcatggcagatacagaggcacagtggggctagaaggaagaaagtggtggctcttaaggccttggcttggagctgccccatcttactcccacccatattccaatggctgagatgaggcatagggccaagcccatcagcaacagcatagggagcattctctgcctacagtgggccttgggaaaggtggggtgggaaggaagaattgtgagtaactagtttctcccaatccacatataagaagctctgaagcttcagaaatgatgtaatttgcctaaggttttacagccagtcattagatgagctgggtccgtctgctttcaaggcccacatgccttttcctggctctctccactagcctgtgctctgacccttgcacacctttccagatgagtttcctgctgctgtctgtccctcctgttcctccccactccatggagcctgtattaactgtactgatgtctctcctgactcttcaaggctgggcaccctttctcctgtaccctcagccctctgtcctggtctgttacaactttgagtacactgcagcctcagggtgaggctcaaggccagactcctcacgtactagaaggcagagaccatgtccttgtcattgctaacacagtgtctgacacttgtgttgtcatcagcaatcattggcagattatgtgccgaacacttcctttcttggagacatatgatggctaatcacctgggaggcttctggaaaatgagtatcaggaagtgacactgccaatgagaactgggccaaaggcccccatggaggcgtggggaaggcacatctgcaaaacagggcacatgtggccttttgttccttctggggagaatgtgaatgctggactcctggctgctgactccaggcaaggccggcttcccttctctgtgaattaaccatccccacactcctctccatttcttttttcacagcttttcttatattcaccatcagatttttcttctgtccatgtccatcccatagtctaaggcaccaatctgttacaacttgaaaatgcagctttgacaaactaacatgcactaaatttgatcacctgctgtttaaaaagtattatttcttagttatttgtgctagtagttttaagcccatttaggagatgctcacaactctggtaagattctctgacaggtatagctttccttctgtcatattcaattataccctcttgtattcatttttaacatcactagtcttttttctgaaagccattgtcacttgcacatcagccacctgtctgtctctaggatacgccatgtggaatagggtaaccacactggacacgctgtgaggtggcctgcttgggaatcattgagatgaatcacttcgtcaagtcattgtctttttttttttttgagacagagtcttgttctgtcgcccaggctggagtgcagtggtgtgatctcggctcactgcaacctccgcctcctgggttcaagcaattcacttgtctcagcctctggagtagctgggattacaggcgtgcaccaccacacccagaaaatttttgtatttttagtagagacggggtttcaatatgttggccaggctggtcttgaactcctgacctcaggtgatctgcctgcttcagcctcccaaagtgctgggattacagacttgagccaccatgcccagcctgaatcattgtcttaaacttagtggtcacttctatgcttccttggccactcagttactggctttgctcccactgcccatgtgggatgtgggtttgattctgggcagccacttgtaggggagtggaggatgggtggagttggcctgctagaatcttctgtgactgagccggcagtgaccatcattctccactcctgtgatgagtgttcccttgatgagagtacttaggcagggatggggagagctgcgaacacaggtggaggtccagctgggtgtgtagaaggggtattctgttagtctatctcgataattgtccacagcatcttctggaaaacatgaaaaacattccattattattagctgatgccaagcttgtagtaattgtctcctgagctattgctttttaaactgctgctttctttgctctagtgtatgcagtttttggatttaccagcgtggtgaacctcatcataggactggagcaagatggaatcattgacgggttcatgacacactacttgagagaggtatgggatcacttagtgattatgaggtttcaaccaaaaggccacaacccagatcacattactcagagacagaaatcctctcatttagtgtgaacaggtacgctacgcaggctttcatttcctataatagccttaggtcgcttagtcacatggaaagtggagcagaaaggacggttagatcacgagaggcaattctctccaacattcagctctcacggcttctctcactcatgaccgcacacatgacctgcttttcccctttatctgtatttaatataaataaggtaccttaaatggatttagtatttatgtgtctgttaatacatgactatctcagaaaccccaagtcagtcttaaatttgtaaagtacccaacacagaggcacttgatgaagtcatttgattgtgatggcttgcactctccaccatgctgcccaaatcatagctttgatactacctggtactcgagagagctagtcctattttcttattttatggtgggctgaacccagccccagagaggttaagtgacttattcaaggtgacacaggaaatgaggaaaagggctcaaagcagattcttcatccatgttcagataatggggagctttgtatgtacgctgtgggagtttgggttttatcctgtctgtgagggaagattttaagtcagtgaagaatacaggcagctctgggaaggatgggcttgcagggaagggtccgtgccatgagctggggcaccagtcaggaggcttcctcgggaccagcaggggcataaacgtggctggatggaggcagcgcatgggaagtagagagagggatgaactttagagaatcggagtggctggaatgaataagacttggggacaaattgggagtgatgggaaggatgaggcctaagacagtgtcctgattcctgctttggaatttggaagaatgctgctgtttttacaccagagagggatgacaggaggaatttatttctgcagacatttgttgaaggggactctgtggtcagaagacctgctccctgccccctgggagctccctgcctgaaagggtggggagatggaattgtcccaggcacagtgagagactcactccaggcacagaagtactcagaggaggaattaagtctgggtgcagtcggggaaggcttattgagttggtgacactgctgtagcattttaaaaatggtcatggcagtggaagatggacatttccagatggaccagggaggtagggggaattccggagagaagggacagcttgggcaaaggcttggagaggagaaagagcatgtgcctctccctggggcaccaatctgcaaggatgaggctgagtttctatggggaggtggagtttcagatgctggcagggctttgcaggtcttgagctctgaggagcagtcctggaagagagagtcacgggccatcggagtgcagttggtacctgaatgtctgagaggagaagggcttgcctatgagaaggtagagagagaaaagggctgagcttgggactttagagaccatggccagaagaagagaagcccctgaagtggaccatggggggcaggccaagaggcagaaggaaaacctggagagtgggggccatggagcccagaggagggaggttttaggaaggaggcggctgacgagagggctggaggctgagttggcaagggtggtaagcattggggcagacggggtatcagaagggggactggggtgtaactgtggtggcaaggtctgcagggccaggctctggggacccagctgtgatagagaggagatggggcttggtccagcaggctgtgacaagttttggggagttttagagtagaggaacaacatgccaagagccaggccttgagaatctttatctggcaggaggagtgtcatgggttggaaggaggggacaaaggtagggagaccatttgggaacatagctgtggtccagtgagggacactgagggctagacctaatgctgtgaagaagagggagaattgccggggtgacatcgtagcaataaagttgatagatttgctgagagactgcataggagaatgaggaatgaaaaaatgaccatgtggttttgaccttggtaagccgaatggtttcaccattaatatagagaggccatggctggcctggtggctcatgcctgtaatctcagtgctttggaagacaaaggcgggaggatcgcttgacgccaggagttgagactgcagtgagcaatgatcaccactgcactctagaccgggtgacagagtgagaccctgtctctgtacgtacacacacacacacacacacacacacacacacacatacagagagagcaagagagagagaggcaagatggaaggctggttgaggggagaagctgatgaattaagagttcaggcgagttgaaaggacctgtggcctgtgcaccatgcagttaaagatgctcatcaagctaccaggagaggccagcactggctcagagagccaggtgtgttagcaatggaagtctgaaaccataaatcggatgtattcttcagtcagagcaagtccaagagaagggacgtgggcctggcatgggtgtagaagcagaaccttgattctgtttcctgcttctctgattttaatttgatttgatctgtgggagagatgacagagcagtccttgccccaggggagcatgaagcttaagagaaagccctgcttgcttggctgattgatgggctggttgatctgcactcttccttgttgtagaaaggacttaaggcatcttacagcgtgaaacaagccaggacagcatgaacgtgggagaaagaggaaaggaaaacaaggtggggccaaaacaacagtaaaaatgcacggaaaattgatgacagtgattttctagaagccacctggaaatgtaaccacctagaaaagggaaatgtagttcgtcatataatcttgtgttcataacattaacatttgcccaggagaagtatggctcttcttggtctctgctaggtatactagctacgtgaccttaggaaagtcttgtaatctcagagcatctgtttcctcatctgtaaaatggactcaatcctgtccatcccactgggttgttgggaaggtagaaggaggggttgggtgtgaagctccgagttcggtgcctgcctgcctatgtgtcagtatgtggggaatgagtgttgtgccatgcccagcccagcaagccacgggatcagcatgaattattaaggccagccactggttctggaaagcagggtcatccctggccacctctctggtcactgccaagcaccttgtgtcaaagatttggcttggtctccatgagtttgccatacagccaggattgcctatcatgccatctgccttcgcatcacagtacaaacctatgttgatgcatcatgggccaattggccaggcattctctaattccatcctctgtggccagaccctggttttggcagctccagcgtaaagttgtattttcatgttcctaccaattttgaagaaatagtttcatcttagcagatgaacacaagttagttctgctgttttattttacttgcaatacaggtctgatgttctgcatttacaggtcttatttaaagtggacttctttttaatgctttctttagggtgaaccgtatctgaacaccgcatatgggcacatgatctgctactgggatggctctgctcattatctgatgtacctggtgatggtggcagccatagcatgggagtaagtcagttcacctggtgtgtgcctttgccaccttagcaaccgataagcgggtatgtaaggaaacgttatgcatagaggcaaatacacaagcaggtatactggacatgaatataagttccatgggtgcacgtcagacgtggctttatcctccttgtaccactgccttttgaatatgtccttctgaattgctccctagcatggtgacagctcgggcagaccctttaagctttctgattatgttgtcttacaagaataatttttattttcagcaattaaagctaagcacatcttaaacttcatttcaaaacttcaaaatttccaaacagcaatctcatttcggttcaaagcttctgtccttccccagatcaggcacagctctgcggcttggctcgcactaaggcttggctacatggcttgtccgttcactcctcctgtctcactctgcggctggccccttggcagtggatgtgtatgtacaagggattaaaggaacaggagccgagtctgatgtgaaaggtgctggtttttgggtattggtacccccatcatgatatgctagcttggtcttgggaggcacacatgtgagttctttagagaccccaaccacaggagcttctgcattgcactaatccctgaagtgaacgacgtgctcttgggctgaatttctgcccatggtggcacacccacagctttttttctgctggggcccctgtaacccagaaggtacaccctttggggaggggtcttttcaaaacatttcaagtccggccatcttctcaggcctccacttgcttctgggttacagaaagtcatgcattcttgccccatacaaggttgaaatgtagtttacccaagtatctccctcactcccaacatgcactcaaggtcagctccagctaattctttttttttttttttttttttgagacaggctggagtgcaatggcacaatctcagctcactgcaatctccgcctcccaggttcaagcgattctcaggcctcagctgggactacaggcgtgtgtcactatacccgcaaattttgtatttttagtacacaaatctaaacatttttttcaccatgttggccaggctggtctcaaactcctgacctctggtgatctgcccgcctcagcctcccaaagtgctgggattacaggcgtgaaccaccgtgcccggctccagctcattcttatctgttctcctgcttataatcccagtcattatgaatgggcctcttggggtctggttacatttggcttgagggcgggggtggggcaggacgcacacagtattctcgtttcccttcagagaatttccttttgaatttctcatagcctgttacatagtgtggagtttgggttattggggttatcaattgaaggaactttttttttttattttgagacggagtctcgctctgtcacccaggctggagtgcagtggtgcgatcttggctcgctgtaacctccgcctcccaggttcaaccatttctcctgcctcagcctcccaagtagctggaattacaggtgcatgccaccatgcccagctaattttttttttttttttgtacttttagtagagatggcgtttcaccatgttggccaggctggtttcaaactcctgacctcaagtgatctgcccacctcagcttctcaaagtgctgggattacaggcatgagccaccatgctcggcctgaaggaagtttttgtcagcattgaagatttggggtatatgtctagcagctcctttgcaacatggggtacatgtcacttgtcttcacctttggggctttggccaaaattctgtgaccccagaaaaagtccatttaacattatcattgtaagtataactcatacttataatgattaaaaatatggatccaatttcatttcttctttcaactttctttttcctttcatgctgttgagtttcacacacaatagggaaatgcaggagtcctgtggcagggatgatcatgttgtagtttaacagaagacatagcaggcgtaatttcctatttaaaaggacacgaagaaggttctatagtatatcacatggcaatgaagttacataaccagggctccttgtgtttgatttattcctctcaattcaatatgttttgattgatgtactttactagtttgaatacaaaataatattgaagatcattttttgcttagtattctaagacaaacataccaagtcaagatttttttgttgttgttgttacagggaaacttatagaaccattggcctatattgggttggatctattattatgagtgttgttgtttttgtgccaggaaacattgtaggtaagaaactttatcttaaagttcactttccttttctaaaacaatggggcttgtttttaaatagagaagctcttttagttataatagaaccaagtgattccaagcttactaaaaacctgttttgcagaataattcctttttctcacctttaaaaaaagtactttttaagaagtgctttgagcaattttcagatgtgtgcattgaacaatttggcagtcaagttatcagggattcctgtttttttagaaggatcttgagggagtgagtatggtgtttatggctatatttagtgtgcaaatatgttaactcctgacacactatgagaactccaaaaatgtacttggaaattacaagtacattattaatgtatgcaggaaatcaggatatataggtagatagatagatagatagatatagatatagggagatagatatatacaaacatatatagatacctatctagatgtattttttgagacaggatctcactctgttgcccaggctggcttgcagtggtacagccatagctcactgcagccttgatctcctgggctcaagcagattactgtagataggacatgcctgttaatacacatctagtattttaaattgacctttttaatttggcctcattaaaaatattgtctggcccatagcaaaattttagatgacctgagatggggaggtatcctaaatattacttgtgttagatatgcttttggtaacttctttctctttctctcttttaaatagggaagtatggaacacgaatttgccctgcttttttcttaagcataccatatacttgtcttcctgtctgggctggtttcagaatctataatcagccatcagaaaattataattacccctcaaaggtgattttattaagctttgatgtaccctgttctcaaactcatagggttctttcgcatccactggccactgaattgaaccatgcctctgtggactggagcatttggggcatccaaacagtgcgactgttttgattatgtagcattagcttacgtattaattaatgtaggcaagaaggtctgtttctgtctgaatacatctgcttctgttggcaaggccatactttggggagcttcctgtgccagtggtcacactggctctaactatcagattctgcattagtgtgtcaagtgaagtccatagtgtgtggttcatctaggattgttaatggcctggacgttgaacacctgggttcctctgtgacacctatgcatttactaccccaagaggacactggagggatactgctcctcaaggtagtctacacagccatacaatcttgactccagagatccaggcccatagagactggctacaggacatctgagacacctcccttccattcacagccaaggtagtcaaggtgaaacagcactggcctggcagatactctgttaaggccttcatttctaagctagtttctctctgtttcttttacttttctaggtattagatcatttagcaagatcttttaagcaaaactgatatatgaaaatatgaattactagagataatcagaatacgactattcattttacaaaagattttcagtataattcattaaaatacattttaattgacaaatacttcatttgtaaacatttagacaccttctatgtaaactcaggctggcacactgacagctggtactaacttccctctgaggaaagaggtggctgttaaaaagaaaaagcaaatagtcagtccacccttagtcccagctccactgcttttaaaggttccatgtcagtgtgtcaacagagtaggtatgccatgaggcatgcagaattacttatcattatttttaatgtgaaaacacagtgacagccagggccaagcaggcattgtcatacagtgctgacagaaacataaattcagaattgctctgcaaagcaatttggcaatgttatcaaccttaataattctggaacccaataattctgctcctagagccctatcttcaggaaatcatcacacagataccaccaaagatttacaaagttgttcatcattacattaagtataacagtgaaaaatgcctaaatatccaacagtgggagaatggctaaagtgtggtgtttccatatggtattcagtttgagaaaatttttaaacatgtgggaaagtgcttataatataggcagatgttgagagcaaaaagaacaaatacagaattgtttatatacaggaataattttatatataaaattgttcctaattttgtgaaaaatgtagatatatgtgtgtgtatatatgtatgttgtgtgtatgtaactatatctatttacatgtattactggaaaagtataccaacggttaatagtggtgtggcaggtttatggtttacctttaaaatttattatcattaaaatgtcatttcaagaaaaaaagtggactcatagagctacaagagcccttcgagagatcatttagcccaaattcttcatttcacagataaggaaattgagacttgaggaaggaaatgattttcctaaagttccatggccagtgatttatgatataaattgtgcatcttcaaaattctcttatccatcatcatgacatttaatgtttcagatttcagattcttctttggcactttgggcctgctctttaggtacaaactctattttaggttattcaagaagcccaagcgaaagacctgctgagaagaccatttgatttaatgttggttgtgtgtctcctcctggcaactggattttgcctgttcagaggtttggtaagcataacagatcataataacgtaacattgtgatactactcacatttccaaatggaaaaaaacttagaaatatgtttttgtttttccatcagacttcttagcaaactaacaaaccattcctcccatcaaagcctggagccctggacctgcttcctgctgctcccaaccccagcctcctgctgtcacctcctcctgtccttagatcaagctctactcagaagcatcttcctccccgttttagggcatctaaaaaatcagccatcagagtctctcttttttattcttttgatgtttctgatttaaatgtaaatatctttggtaaggatggcaccctaggactgcaacacaactgtggcacagagcatccctgtgttctcaggagtaggggcaatggggttgaggaaggcgtaccagttcaacaattcacgtgtatgtagggtcatgggaatgtctcactggtaagagtagtgttgagtaaattcatctcacgcctggagtctttgtattgatgtgactgaaatacattaagggcacatgggcatttcatgttttctattttctctttattaatattttactgcagaggttaggaaaaagactcacaggctttgtagttagaatcctggccacttactagctgtgtggccttggaaaaactacttaacctcttggactctgttttcctctctgtaaaataacactacctaccttaacagtattgttttggagattaaataatgtacatcaaacacttggtagaggctcttatacatagtaaatgattactgttaggatttttattgatcagtgatccttcacaatgccccaatttgatgatttcttcttagtagaaatgaatttgggaagtttagaattatattgttaattatattcagcttcagtgacaatttctattcgaagcctgttggcgcgcgtaacagttggacagtagagtggcaagtgtaagcccatgcaggtgacttttatcatttcagggtcttgggctactgggggcctgtgcagcaggctgggttcagggtgagaagctgttttaagagttatctttatctgtgaaatgtcaagaaactttctggaggagagctggctaacaggaggaggggcatggggaagagaagtaaagaaggcaaggccatagctttgcttagaccacagggccactgaaactgttctttggttagtttgttgtaattcttaaagttcaaacaacaaaaaatagtgggccccacctgtattcttgcacggccatatccccttccctgtgcacgagaaaaatgtgtgcatgtgtgggggtgcatgcaaggtgggtagggcttttggattggggccatttttaccaactctgtcattggcctgtgttcatatatgccatctaggtgggacaacatttatggccaaagacatgaggaatggtgcctgaggggaggaaggtgactcagaggggacctagtaaagtgccaaaaagactttccagcaagaggaccctgctttcaaatcatcttttactgcctccaaaggccatatacgctatgatgcactggagacaggaaggtgctattttcaaatcttgcaatgcatagtaagatgaatttggtgtagaaatatacttttcttcctgtagggaatagggggctagttatttccaagaaaagtgaaactcataatttaaagcaagctgtgctttggctagccaaacctagatacttaaactctgaatatctgaaaaatacccaagaatagggcattagtttccatttcctgcaccataattaacctttgcttagtctccttagaacaaatctgcaaaatatttccatcattgatgagcctctacaatgcatacgttttgttaaacagcaaagcagcttgtgactaaacctggcacatttagccttatcagcaaacctaagaaccagatgtgattgtatttttataatgagtttatttttgtccttagattgctttggattgcccatctgagctctgccgattatatacgcaatttcaagagccctatctaaaggatcctgctgcttatcctaaaattcaggtcaagtagttatgaagcctaagatttttctaaaattaattttctttttaaaaaatgggtcccagctgggtgcggtggctcacgcctgtaatcccagcactttgggaggccgaggcaggttgatcacgaggtcaggagtttgaaaccagcctggccagcatggtgaaaccccatctctactgaaaaaatacaaaaaactagccgggcatggtggcacatgcctgtaatcccagctactcaggaggctgaggcaggagaattgcttgaacccgggaggtggaggttgcagtgagccgagattgcgccactgcactccagcctgagtgacagagtgagactccacctaaaaaaataaataaataaaaataaaagtaaaaaaaaaaaaagagtcccatataggaaataggaattaatattttcaaagatgaaaatgtttacttttttgtactttttagtcaggccaagttaactgccaatttgctgatgatgttatttctctgttcaatacagatgctggcatatatgttctattctgttccttactttgtgactgcactgtatggcttagtggttcctggatgttcctggatgcctgacatcacattgatacatgctggaggtctggctcaggtactaagaatattctgttgagaaggtttacttgtggtctaggtgtcaattgttgaatatatgaaaaacttctctgctcagtgttttagactaggagatagctattagacatgtcaccttttgttttgcagttcttcagaagacatttctgcaagtacattttatttcaatctcacaataactatatggtagatgtgccatccagttacacagatgaggaagttatctgtggtccagtgaagttaaatgatttgcccaaggttacacacccagcatgtggcattgttgttttattggactgtttcacaatctctgaataccatggctactaaaaaaggattgagagctgtcaccttcaaaatgtccatccaaatttaagacttcagaattccactacgctatgctatacagaaccagggaaactggtttaaaaaatgttctgggcctgtcatttcattccttttccgctggcaccttgccaaatatttggcctagagtaggtgttcagtgaatgcttactgcgtttaactgaaaatgaaattatctatggagaacttcacacataacataaagcacatttttacaagataattagcaaaacaaatcaatcttctgaacaaggaagaaaattaatttttcttactagaaataaaacaaatgaacttatcatttaaaaacattagcttcatcttgttcttttcaagcagttataagaatgaggttcatctagaaactgtaggcttgtacagtcaattatatgcatggtataataatcatgatcgtaagacatactagaattcacacggttgaaaaatatagtatttaaggggtcaatgcattaaatcctttcagtttgaggtaattcttaattataaaattagcatagtagtatcgaaaaagttgatgtagcatccagaagtaatggttcctgtcctttccttgaggggcttaagaaggaagagaactaacatttattgctctttgctggttgtttttcctttgcagacctctaaatacctgattcctcagtccttggggtttatttctgtattttaggtctttatctttgtatctttcaataccaactataagctgataacttccagttttctaccttcggcccacaccgttcccagactcctgtatttcattccaaactcagtctttttacttgcatgcctcactagcacctcagatttaatatataaaataggacctgatcctccccacaacctctcttccattttttcattatctgtttaaatagtccaattgcatccagcaactcaagccagaaacttggagtaattatttacactcctcatcctctacatctagaccaccactaagtccttttttttttcttttaaagagacagggtcttgctccatctcccaggctggagtgtgatggcacagtcatagctcaccgcagcctcggactcctaggctcaagcaatcctcctgcctctgtctccagagtagctgggactacagacatacaccaccgcacacagctaatttttaaattttttaaagagatgggatcttattttgttgcccagcttattctcaaatgcctgcttcaagtaatcctcctgcctcagcctcccaaagtggtaggattacaggtgtgagccaccacacccaaccaggtccagttagttttactccagtgattctccaacccattttttttttccagctccgctgcccctacactagtctgagctctcattaccttacttcatgccaggcaaaccacgttaaaagttttacttacctatttgtctaaggataggctatgtgctctgctgctgtaacaaatactcagagtagcttaacacaattaaaattttaattcttttttatgcaaagatcatgtgggatattttcaaggtccaggcctggcaccaggtcaactgaggggaggctggtgactgtggtcttcctgcctgcctcagaataaacagcacaatggacacataataatatcttttgtaatagctctgggaaaaaaaccccaatttaaagatgaggaggctgaggctcagtccacctgaaattatttgcctaagattacagttattaaatggcagaataggtttatgaaatcctgtctgactccaaagctcatattcttctccattgtgttatctcacccaccccatgcaaacaatgaactatggcacagagtcctacagcacaaaagactgtatgtagtacgaggtgctggagaaccttgtgggtggaaggcagtgacattccgagttggactctgagggccaagtggggctttattaggctgagcctctccagggaataacccagggaaacactgaggtgtgggcatatgcagcaggtctgagggcagagtaagccttgcctttttttttggcctggttcctctgccttattctcctgtatccttcagaacagatggccgcatacccacttcactcttgccagccctttctttagaggattagactgttcagtttgacagctgttcagtttgacacctattacctgtgtcaattgtgctttgcctgcacaatcaggcctcctctgcctgccatgtgcctggtcggcctggtaccagtccctgatgcaggaatgctaagtgtcatcagccagcaggctggttaaagagaccagatgttggacctggtcaagtctcaggagacaaatggaaacagcaggaaaacctaggcaaaagcctagtcacatggccagggtcaacagtcaggaagcttaggaaggtcatagcttagaggaaaatgggtgtggtaagcctgtagcaataagacaaaccctaatctgttggtgaagctaagcttgcaggtgggcacttattactccagccaagtggttctgagaagggcagtgtggactacagagcagctggcagccgcaggggcattacctcattcatgtcagacgtcaggcatcctggggcttatccatcactgcccagttgataaggcagcctgaagcccctctcttgatggtgaatgcccagatccagagcctaaggctaaggaccagatcctgtaaatgtcagaaggatgtttctcccagcccagcaggtgaagacagactgagtaaagaattatgggtctgattcccacagctcttggctgagctttaatatctacccacttatagtgtgtaggctaaggaaaagttagaagccatgccgcaacaaaacaatagatatgaccagaatactgaattacgttatttgttttgtacttagcaaatactcgcttatgaaatggagtctcatcttatgggagtatctgacacattcatcacagaaagcactctccagcaaggcacggtggctcacacctgtaatcccagcactttgggagcccgaggtgggtggactgcttgaagtcaggagtttgaaaccagcctgggcaacatggtaaaaccccatctctacaaaaaatacaaaaattaggctggcgtgatggcatatgcctgcagtcccagctactaggaaggctgaggtgggaggatcacttgaaccaggaggcagaggttgcagtgagccgagactgtgtcactgcactctccagcccaggtgacagagagagaccctgtctctcccaccaccacaaaaaaacaaaacaaaacaaaaataggcatttttctgtaactttaatcagcatctttgcttgctaaaattgccattcttatttagaaaccttatgcattcatgatcccactaactttactaaaacttacttttactgaaacatctagtaaactctcaagaatctatgcaacttagtaagggaaaaaaaaaccacctttgaaaagttctagatcagtataggccaatggaagaaatattgagtagtggccaggcgcagtggctcacacatgtaaccctagcactttgggaggaccaggcaggtggatcacctgaggtcaggagtttgagaccagcctggccaacatgacgaaaccccgtctctactaaaaatacaaaaaattagctgggtgtggtggtgggcatctataatcccagctacttgggaggctgaggcaggagaatcgcttgaacctgggaggcagaggctgcagtgtgccaagatcacgcccactacactgcagcctgggtgacagagcaagactgtctcaaaaaaaagaaagaaaaaagagtgagtagttattggggccttgatttcagaccatgtaggagtctgccaaatctgctgccttcagaaatcaaaagatcaaggaaagagtaaaagaagattgaataaaatgaaaccaggacacattttagaccaaagagttccactggggacttactcataacccaggtatcttttcatataaaatgctaaccataggattaaagctgcaagtgtaatctgaaaggcattataggctgcttagatccacttattagcatttcctatcaattgaagcattttctctgctaaaatatcaatgaaaatgaaaaaaagccaaagccagtagagttcatatagttaggaacataagctctggaggtgaactggttcagattctagcctgttgctgatgagcacaatgaccttggctactttacctctctgatcctcagtttcctcttctgtaaagtgaggataataacagtagctttctcatggaattgctgttagggttggatgaggtaatacatgtaaagggcttaaaacagtgtctggcacataacagctatgtaaccctttgttgctactattactggtagaagattcccagtaagaatttggagatatgccttatgttgttccgaagattaacctgaagacaaactaattaaattaagtgtattgtatataattaccaagaaaacaaagaaactgggtgaaagctttgggacagactcaccatgggcttggtaaggagcctgccatcccacagccagcgaaggaggttcagttacttcagtcaggtgctgccctcagactctctaactccctggctatgtaggtgctatgtcatgtctttttctcacaaagagatatggaaacttacgtgtgaataatttggttgtgaagagtttactgaagtaaatttatcattttttttttaacttgagacagggtcttgctatgttgcccaggctggtctcaaactcctggactcaagtgaccctcccgccttggcatcccaaagtgctgggattataggtatgagccaccacgctcagcctggaagtaaatttcatacggtttttccctcatggagacgttaagaaaaatctgaaagtaacagtttaggaagaacacggatagttgggatactaatgcaaatcttgttttcttcatttgcttctggtgtgattcattgctaaacatctttatttagtattaaattatactgatttaacatcttttatgtacttatcctttcatggagacactcacagtaaaaaggtcaaaaggtcaagagaatctaaaaacaaagggcccagattttctacagtcgagcaccagatcatgaatgggtatttcagttttgtacttgtgtctacagaatagccccaagtgcttgacactgtctaagcatgtcacaaacatcacctcactgaaccctcataacaacctatgaggtgggttccacacctcacccgaggccatacggctggtttgtggtggagctgtgatttgactctggatgtctagttccaaagtcagtgttctgaaccaatgaactatgttgctcagaaaactctaagaaaagataacacagttctagattagctatttatactgtattagcaaaagaccctggctatcatcccaatggtcacctaagttttctgcctataacattcacatggacatataacactctttcagttcctccttgtggaaccacgattaacttttttagttatcctttacagattgtctctatacatgtaagaaaacagctcttaaaatttaacctttgttcaccttattgtctcatttgccattccaatcatccattcttaaaaaaaaatcagagtatatctcttaattatttctgtaaggtgaaaatgatttagaatgaagtggaagaaaaattattagggactcaacctcacattgctaaattctggagaaatttctaggatcaacaactcatatctgtaatcctgggcctcctgttaattcagcagcattgagttcactgagccacctgaccccagcacaggctcaggctgagctcttcaggtcctgccatgagaggccttgtgctgctgggaacatcacccaggagaaaacctgcagccctttattagctatgtgcttgggaagagaaacctcctcaggtgagactgtttttctgaacttcagaaccctgaacacttaacatcctatgccttaggagaaagctatggtcaggtgctcactcagctggaagtgtggccaccataagtacatccattaggactatgagcagtactgggagctgcacaccactggccttagagttcttctctcacatacaaatgcctcttttgattatgaatgttaaaatttttgtgccttgtttaataattctgaataaagaggcctactaaaatacatacaaaactagagaaatgctttgtagaccctttttgtattttgacagtcacaagtccattgttgttgaacgtttattgagctctaacaatgtgacaggtgccacacaaaacattagacacagtacctgcccagtgggcttacaatctaatctaaggacatgaatctttttttttttttaaagacagagtctcactctgtcacccaggctggagtgcagtggcacaatcttggctcactgcaacctccactccccgggttcaagcaattctcctgcctcagcctcccgagcagctgagattacaggcgtctgccaccacgcccggctaattttttgtattttttagtagagatggggtttcactatgttggccaggctcgtcttgaactcctgacctcaggtgatccacccgccttggcctcccaaagtactgggattacaggcgtgagccactgcgcccggccatgattcacttaatgttgccatgagtttgctgttcatgaaagtgaggtattaactgcactggttagtgcaggaaaagagcctacggaatcactgactttttacacaggctcccctatgcaagtaggcacaactgctcatatttattctctcaaagtatggttggcatttccccaaatttggtgattttgtgatgtgtacaagtatctataaagacagaaccaccaaacccagatttctgagaaccagggatcaaatgtggcttccagtccagagaaaatgcttggttatatattcagaaaaacactattattcaaaacaggccctaaggaaaaacagtatgggagccatgctcctgctcagagttcctagaatgtccagaaagcacctcctcagggcagccctgaaagtgccctttactctcaaggcattttgtcctcagagcccagagatgcatatacatttgctgggttctgcctgggcatctacccaggggagttgtatctgagggccgagtcctctcagtgcctcatggatcacaatgtagacaatccacgtgctggtccttggcaatacatcatgctaatttaatttatatctccagagtagcaaaaatgtaccacaggtctccagaatatatcaggaatttgtaaaaatgcagcccattaaaatatctgccactgataaaaaattcataaagatgctgcttaaaaaaacttgtccttttcttgtcatggtgaagtcaagtaagtaacacctttatctgtgaaatcactcagcagaataaattggtttcatatggaagaaatgtaaaataacttatatgtatttaaagcaaattatctagttcttcattcttgttacttctatgccttctctatagtgcagtcttttgtctctttgatcctgatgaactgataatttactacttattacatttagattcccaatcctttattcatgtgtatcttgaatttcagcaagatatgaaaatgcagactccaggggtacattttgtaatgatacaagccttctgaggaaattttctgacaggagcttttaatcctgctgtggtctgttttaccctttccaatacggttttcctctgtgcttgcgaaaaatatcaaaaaagaccaattggcacattctgaatgtgttttctgaataagtatataagtagagagggaggccattttgcaaatgcggataatgctgacatgtcgtacttctaaataaattataatttgatttaaaaaggttgcctgcatgtacatttgccattttacaaagagcaaccgtactcctacctccacccaagttggtaacaaccttatcttacaaacaacccttaatattttaaaagctgcagaaaaaacaaatacatgaataaatgaataaacaaaaaacacatagggaaagggtatgagctcttgctgcaaggagtagatgaaagactgataaatgaagctgaggtccccccagtgcttccctttcaatagtttatgctaaaaatatttgttttttaaaactctgcgctttcttcatttttattggaacgcaatttgtgaaccacaactgagtctgtatgcaggatctccagaacgcaaatcagaaaaaaatttgagattttattcagatttttctattagattgagccactaatgttcggtaaggggcacttgatggttaaaaaacacaactggcatgataaaactacactaaataatatctactttatttgaacagtcatatcaagaatggccctaaatttaatcaaggactaaatttaatgaaagactctgacattaaagactctggattgtttgaaggtattttgcctgcaggtgagactggttttgagggcacagaaacgtagcctgaatgaaccattcagaactcatcatgcatccaactgaacacgtttcatgcttactcaattttttttttttaaatgcaacaggctcagttttctcacattggtgcatctcttcatgctagaactgcttatgtctacagagtccctgaagaagcaaaaatcctttttttagcattaaacatagcatatggagttcttcctcagctcttggcctatcgttgtatctacaaaccagagttcttcataaaaacaaaggcagaagaaaaagtggaataaaaatattacttcatgttcctcctttctaaattactaacttttgttatactggtactgatattttgtcccatttcactctcttctcatacgtgagtacttaagaatatgtacattcttgctctgcactgtatgtgtgagctatatggtattgtgtaaattttttttgaaggaaaatggaaattcttgagaaacagtttgtttaaagaaatatattcaaaatcatttgtgaataaacttgatcatccatctcaatattgtttgacatataaaataattataagtgtaaaaaattacaatttagtgccaacagtagtgagcatgaaatgaaactattcaaaagagaatatggcctgtgcatattaaaaaattcaaaacagtgaatgcagactggaggagtaacttttgcaaataagatgaatatgcttcattattaaactcaatataaaaggcaaatcatcagaatatttttaaatgttgtttgaaaaatgttttcccaaggaaagtttattatttgctgctgtttcaagaaaattacttttactaaatttttttgtgtgaatttaaacagctaaatagggatcagtaactttatctctatccttaatgaacatttgttttattggtggctggaaatatttctattgtatttctgtgtatatttttaataaaattatttttggcctcttataaagacaaatcttattaaatttgaaacatttcatatatacacataaaacgcttttaaagaaaatttgtgagttgtatattccaattcaaaatgccatctacattccccttatgtttcagtgtgagcaatgaagaggtcttttgatgaattaaatttcattaattaaaaaatacattcaaatattcaaaattaaaaaggaccttttaaggaagaagtattagatcgacatccctactatctttttatgaacttttcatgtttgggattgtatgttgagtatactagagaaaatcagtattcactaaatgaaagaaacacaccaaaaatacaaacagccacctcctcactgtgccctggaatgataaatggactggtgctttcatacccttagctgccatcatcaccatcatcattattaacggccctaggcttttaggtctgctcacattttctcatgtttttattagctctcatcaagaaaaccaaaagaaaatgggatacaaatcaatgcatggataatatcaaattacaaaatctagggtccactgggctggtaaatatgtaagtgtaagcaaatcatgtagtcatctccccatcatcccctacagtgttttcaaataatctaaaacccagagagtgtttaaaaaaaaaaaaagaaagaaaaagaaaaaccctcacctgcacttgattctattgtcagcttgctgtgaacaatttttgctttaatatatgaattacattaatacctcacgttacatatatgaagccaaattacactaacttagtttgcttacaacctcaaatcttactcccagtacacattccaataaatttattctgtaaaaacaatacatttttttgtttttgatttttttacagtaaacttttcaactacaaaccgtgaatacgcgaaagatgttccaaggacaagcattaacaggattgataaaacccaaactgactaaatgtgttctcacaatataagctggcataaaaataaataaaattctctattatcacaatagcaacaataatgtacacataataatggtttaaggatgaatattaactattctaattgtagttccaaaagaaaacagtttattttaaaagtctacatttaaaagtcaatgctttgtctggtttcccatagggctgttgctgattccagctttaaaatgtaaagtatccaccttgagtgcttagctcaaaattgtattggcactgggaaaaaaataaatcattgcctttattttggagtaacacaaaaagactcactaacttcacatatagaaacttagtttgtgtacataacaatatgaattttgagaagtataagctgtcaactagctatttctaatacggaatagatattttacaatatggttaaactttacacatggcctcaaaactgaaggacaattttaatttcgtcttcaatataccaacgttatgtatttaggaattaattcctgggttctgtcacagagaggaaattccattcttaagcattatgttgagtggtcatctaaaaaatgttaatttatatttaactgagtgtttgatgatggtggggtcaaggcaggaaaacgatgatcataactgccttgataaaaggatcctagacatgtataagtctgcgcaaaaatcttgataatccttagtggttaagggcaacttcatgcaaccaaataacatgaaattaaatcagtaacttttaaaaaaggctaaaatgtcttttccccccgaaacacaacagagaggaatatgaataatgtacatacaaactggggttctgtcaatgacaacaaggactatgtgttggttcatatcaaatccaagaatattagacaaccaaacatataaccttcttgtggtttctcttaatatgcagcattcattatggtagttaggtctgtaaaaaaaaaaaaaagaaagaaaacaagcctttagatgatttaggatactaacaatgagagctatccacacctagatagtacataattgggttttctgaaattttaatatgcactgcagcattaacaatacttactgagcaagagcagcttctgtggctttgctttagacctgtcagtgcaaaaagttaaaggaaatcctagggtatttttagtgtcccatagaaaaaaattataaaccttgtctactgtctgttaggacagagtgcagcagtgcacattctacaattctaggactatgtttattgctggaatacatcatcagtggagaaattgatataatctatctttgtgaggacattcttcagaaagaaaggtaagctgtgtaaaatttaaaaagcacttagagtgtgcaccaattaatcttcagaatatttataacttaattacttgtgacacatagctcaaacaaatgtagaagttaatcatgatgtacaaagtctctgacttcttgcttttaaaaaaaacataaagaataagaggaagcctagatttcttttaaaatttagatggcatccgtgtgacaaacagaaaataaaacatttgtttcataaaagaattatgtttctatttgggtcccactttaaattgtgtctggttctatttccccaaaaggatgctattttttccccctcatcattaacccaaatatattaaaccccctagtaataccctcatgggatgaatgaaagagggaactcagccctcaaatattttttctgaaaacagcctgcttccactcttaatttcactaaatgaatgaacatgtttgtaagcacatgtgcacactgatgggtatgttctcattcagacagcccaacatgtatactaaatggtatatattataataaacgattccaggaccttcaaaggagagagagttaccaaaacttccatccccctaagatggcagaaatatactttttatccttctgtccctattaaaatgaggaagtaaatctttaaaaaaaaagtttgaaatttgtgaacttaaaaaatggagtgcctggtgactcctaattatttcttaacaaaaacaccagttataagattatactcacagatactttggaggatcttcctcccttgtgaaggaggaagacacccattagaacaatgaaaaattgttagtcaaccaaagaaagtttttttttttttttttttgagacagagtctcgctctgtcacctaggctggagtacagtggcgtgatgtgagctcactgcaacctccacctccccggttcaagtgattctcctgcctcagcctcctgagtagctgggattacaggtgtgtgctaccatgcccggctaatttttgtatttttagtagagatgggatttcaccacgttggtcaggctggtctcaaactcctgaccttgtgatctgcctggctcggcggcctcccaaagtgctgggattacaggcgtgagccaccgtgcctggccgaaaccttctttaacaatgttttcttattattactgtgaaaggcaataaattctatgtttatcttggtagaataatcacagtaaaaactactcaatccacatcaaagaatatttttggaacaggtggtcccatggcagcctcagagtagtattaataccccaaacaaagtgaagggagcaccaagaatgtgactatagttttaaggacatgctttttgtggtctttaaacaaggtgctgtcaaatgggtgctttgtaaaagcaaattacaaaatctgagattaaaaaattctcataccataatcactttgcatctatgtattgaaaactgcatcttgctaattcatcatggtatatattctggacatggtactctgactgtctcctagatctgaagtctcctctgagtaagtagccacaagtggttccttatgcactggttgccatgcacccctatattagataatggctgaagaatccaatcggattctctctggaggtatctaaatgtgaggcacactgagaggctatagggtggtagcaaaactgaaggatacccagaacactgtaagcagaagctatgaaacaacagaagccgtaaggatcttttcaaggagtaccattttgatatgaaggaatgataatattcaatatggctatgcagactgggcaatttggcacgttataacaaataagtaacttattacttgcagaaaaacaactgttttttgccaatgataaaatttgagtgttcagtgaaaactagaatttcaaatcctccatgactgacagttttccaatatttaaagactttttttttagagacagggtcttgctcttgtgcccatgctaagtgtagcggtgtgatcacagctcactgcagccttgaactcctggcctcaagctatcctcctgcctcagcctatcaaagtgctggggttacaggtgtgagccaccaaacttggccccaatacttaaagacttttctgatgagataggtagtgatattaaaaatgtgattaaaaacattttgtactgaaatgagtgaatatttggaagacccaagtaattcagaaaacctatattttctaactgggggaaagctattcagagcgctagacaaacaggcatatgaagaaaagctcagtatcgctgatcattagagaaatgcaaatcaaaactgcagtgacataccatttcacacaactcaatggctattactaaaaagtcaaaaaataacagatgctggcaaggttgcagagaaaagggaacgcttatatgctgttggtgggagtgtaaattagttcaaccattgtggaaatcagtagggcaattcctcaaagagctaaaaatagaactaccattcaacccagcaatcccattactgcttatatacccaaagtaatataaatcattctaccataaagacacatgcatgagaatgttcactgcagcactcgctatatacaatagtaaagaaatggaatcaacctaaatgcccatcaatgacagattggataaagaaaatgtggtacatatataccatggaatactatgcagccattaaaaagagtgagagcatgtcttttgtgggaacatgcatagagctagaggccattatccttaacaaactaacacaggaacagaaaaccagataccgcgtgttcttgcttataagtggaagctaaataatgagaactcatggacacaaagaggggaacaatggacactagggcctactggagggtaaaggagaggaggaagaggatcagaaaaagtaactattggatactaggcttagaacccagggtaacaacaaacacctgtgacatgagttaacctttaataataaatctgcacatgtactccctgaagtttaaaaaaaaagcaagacgattaagatactcatatcaccatttttcaattaaatatctgtataataccagattttcttcatataccttcaaccacaattacatattacaataaagagaatgcagaaatagatatgaggatctagttgtcttctatcaaatcagacattaaaaagatttgcaaaaatgtaaaaatgtctttctgcaaacttttctgtgaaatgttattttcataaaaatgctatttaagtaatggatttattatattaaatgaattaagtatttttaaaatttgtttttatttctaattaaataaatatcattaacgatcacatatataaacaaagctctttggggcccttaataacttttttttttgagacggagtcttgctctgtcacccaggctggagtacagtggcacaatctcagctcactgcaatctccgcctcccaggtttaatcaattctgcctcagcttcctgagtagctgggattacgggcacatgccaccacgcccagctaattttgtattttttgtagagatggggtttcaccatgttggccaggctggtgttgaactcctgacctcaggtgacccacccaccttggcctcccaaagtgttgagattacaggccccttaaagggggccaggtgcagtgactcacgcctgtaatcgaagcactttgggaggttgaggcgggcgaatcacttgaggtctggagttcgagaccagcctggccaacgtggtgaaatcctaactacgaaaaacacaaaattggccaggcgtggtggcacgtgcctgcaatcccagctactcaggaggctgaggcaggaggatcgcttgaacccaggaggcggaggttgcagtgagctaagatcgtgccactgcactccagcctgggcgacagagcgaaactccatctcaaacaaacaaacttttaatggtattaaggaggtcctgagaccaagaataaatgagagtaaacggtgagaggtaagactgcaaagataaactggggtcagctgtgaaaggcattgtatgacggaataaggaacgcagacttaatcttgtggggcactggggagatataaggcagcagccactatactgtagaaagaacgggttcagggtcagaagaataaaggcatggccacatggtaaatcgttacagtaaacattgtagctatcattccaatgtttatcctctgtccctccctccagttgtgtggtagccttgtgttttttttgtttgtttgtttttaatgatataagactttattgtcatttgagggtctgttttccaaataatctctagtaaatatattggaataattacaaattttaagtcccaacttaccgatacggcacgattctcagaccttcccctccactgactgccaggcaatcgtcagcaccagacaaggctgcccaccactagtatctttcactgcagccctcctggactcaagcaattctcccgcctcagccccccaggtagttgggactacaggcggatgccatagctgtgtggtaaccttgtgatttagcgacctgaatccagctccaggggtgtggagaacctgaatggtgtgagccagttctaatcctcttgtatcagtagttggtttagggataggtagccttctgatatagtctccaatgattcctgcctccggtatctctacatcacattcttgtgtaatcaccgcccctttagtgtgggctggacctagtgacttgcttgtaataaacagaatgaagcaaaagtgatgggatgtcacttctgagattaggttacaaaagactgacttctgtttgccagcactctctcttactgacactttactgcttactctgatgaagccagctgccatgctgtgagctgcctcatggtgagatccatggggcaaggcatcagaggaggcctctgggaaacaactcatgaggaactgaggcctccagtccaacaaccgtgaggagctgaatcctgccaggaacaatttgagtgatcttagaagaggatccatccccagttgagccttaagatgatctgagttcctgctgacacctggactgcattttggtatctcagttccttttgcaagagacccagagccagaggatttagcaagttgcacctgaatggactgttgatgagtcttgaaaagatgagataataaatgctgctttaagtcactagttttcagttacatggcaatagataactaatacagtaggtgtaagccaatcagtgcatggtgtcctcctggccacagatgagtaactttcaccttctatccatatgaatcgaaggaactccaagcattctagataagggcgcctgctcctttctgtctccttctgctagtggcagaagggaggaagtactcagagagcctctgggagcaaaaagggaccctcgtaaaaatctcttctttctttcccttaacaatatgcataacatcaacccatcatctgctttgagaccatcaggctttttatcattatgccctttatcctagcttactctggatactataagatgggctccagagcacccatcacttcctgaactcatatccccagtcagctttgcacaggtccttttacggcctcatttcttaacagaacccccaaccccattctttaatctcttctactgggccccctgaaaaccacggttagccattagcaaaactcctatattctcaatttgaatttccaagaaattccactcaacaacttgttctaactaaaacctgttttcttctaagggcagtgctgcctctttccctgtaaccctctcaaatggtagctctgttctctcccacagctcttgtactactacttgccctggaggtggagaaggtgtccttcttgctcctccctactatttataagctattcattctctcccctgtgccctaccttccctgaaaataaaagcctcccagttttgaatctcagtgtaagctactcccctccttcctgcaatcatctacagactccctggattattctccttactctttaaagatttcacttctggccctctgtcattcatcataattcctgtgatttcaatatccacatagattatctttctaacattctggtatctcagttccttggtgtcctctctgccaaagatcttgtcttctaagaccctacctcagtcactcgctcccatggtttgttctttcttttttttttttctctctctctccctttcttcttcctttttttttttttttttttttttttttgagatggagtctcactctgtcgcccaggttggaatgcagtggctcgatcttggctcactgcaacctctgcctcccgggttcaagcgattttcatgcctcagcctcccgagtacctgtgactacaagtgtgcaccaccatgcccagctaatttttgcatttttagtagagacaggtttcaccatattggccaggctgctctcaaactcctgacctcaggtgatcggcccacctcagcctcccaaagtccatggttctttcttaaaacaagtgattcacaaccactgggagtaactgtaaatactgtcttaagccactgttttgaaagcaaaattatgtaggcattttaggttattattaagaactctggggttctactggcatttaacacacagggccatgggtactaaatgtcttgtgatgtagacagtgctcgtacaatgaagaattaagtgtcccactggaaatactagtagcacctgcactgtcatcggcaactactgcaacctttccatgattctattcaaatacctcactcttctatcaccatttatatttccaggtcatactcaaactctgttgactctctccctttctcatttacatctttcctcttaagatatgttggattccatggtccattgttataatccttgtacacatccttgattccctggcctctaatcttctttaccctactctctgcgaaaaccttaattctagttaaattcaattatctgtcctctctgtgactgaataattgaatatgcctggagaaaaacacacaaccattgtgacccctctcactttaaattcaagaccactggtctcaagcaagcctttagtattacctggcaattcaacttcatttcccaagttcattcattctcttattcttctaaatgactattttgtacctttttctctctcttgaatcttccaacattttttcctattctcagtctcaaatgctaaccttgttccttaagaaaatagaagcaatcaggtaagaatttctacaagctctcaccccaagtatctacttacctgtatccgtgcccaaatactctgcctttccttccaatttaatggatgaaccaaggtagcccctccagatgtgcaccagatcttataccttctttcttttttttttttgagacagaatctcgctctgtcaccaggctggagtgcagtgatgtaatctcagctcactgcaacctccacctcccgggttcaagtgactttagtgcctcagcctcccgagtagttgggactacaggcacgcaccacaacactcagccaatttttgtatttttagtatggtgtattttcaccatgttggccaggatggtctcgatctcttgatctcgtgatccatctgcctcggcctcccaaagtgctgggactacaggtgtgagccaccgcacctggccctaccttcttgctttctaaaggacactgcttcagcaattctttcttacattatcattttgtgatcatttctgacttggatcattcttactagcatatgtaaattctcccatcaagaaaaaaaaagaccttccttgaacttctatcccagaccatgactattaaatatttgaaaactaaaactattcaattagccctacatgatatcaggactcattataaagctactataattaagagagtgtggtattgaccaacagaacagaatagagaacccagagagagacctatgaatatacgacagatgcactgcggatcagagaaaaaaggaaggactatgcaataaatggtgctggttcaaatggttatgcttaaacaagacagaaaaatgctagccataaaaggaaagtctgataaagctgactacaatacaataaaatttaaaaagtctgattgctaaaaatatcagaaagaaattgaatagacaagccataaacttggagaggatatctgcaagaaatatgatgatccatgttagttagaatctagagtatgtagagaagtcctacaaatcagtaagaaatgaaatccaataagaaaatgggcaaaacccaaaacacgcgctgtacagaagagaaaacatgggtggtcaataaacatgaaaggcagctcaaccttatcattaatcagagaactataaattaacactataatgaccattttatactcactatattggcaataattaaaaagcctgactatgccaagttaatcacagggaactcttccacacctctggtgagaatgtccaactactacggaaaataatttggcattatcttgtaaagttaaaatccatcaactcacggctcagtattttcagttctagttacatatcctaaataaactcttgtacacgtatactaggagacaggcatgagaatgctcacagccacacagttcataataattgcaaaaagctggccgggcacagtggctcacacctgtaatcccagcactttgggaggctgaggcaggcagatcacgaggtcaggagatcgagaccaccctggctaacacggtgaaaccccgtctctactaaaaatacaaaaaaattagccaggtgtggtggtgggtgcctgtagtcccagctacttgggaggctgaggcaggagaatggtgtgaacctgggatgcagagcttgcagtgagccgagatcgcaccactgtactccagcctgggcgacagagtgagactccgtctcgaaaaaaaaaaaataataataataattgcaaaaagctggaaacaacccaactgcccatcaataggagactggataaataagttgtggtatacccataaaactgaatattatacagtagttaaaatagactactgctacacataaccacatgaaggaatcttgggaaaacagtgctgagtgaatgttataagtttttaaaaagctaaaaataagtaatactaaacaatatactgtttatacacctatatgttaggcatgggcaaacatttcaaaaagaaaaggaaataatacaacattagtgctcatctctgggtaggaagagggactggaaagaatacgtaaatagatacaagttaattgtgatgttctagtttttaggttcggtggtagggtcactttatagctttataaccttata

SEQ ID NO: 3405 - DNA, 3621 bp, Homo sapiens
tgagccgtggcgcccctggcaggagcactgcaaggacgcctcccgggactgcaccgcggccctgcgcacttggggcgacggggccaggcgcgggggacggctgcgggctgggagggcgcgcggaggagacaccgctgaggggacgccgctgagggcgccacgcggggggcgcggctgaggcgcctcgaagggcaagcgccaagggggcgcgggcgccgccggaagctggggcggggcgcccagcgggatgcggtgaagggcgagcggcgcggcggctgcgatgagtgcctctgcggccaccggggtcttcgtgctgtccctctcggccatcccggtcacctatgtcttcaaccacctggcggcccagcatgattcctggactattgtaggggttgctgccctcatcctgttcctggtagcactgctggctcgtgtcctcgtcaaaagaaaaccaccccgggacccactgttctatgtgtatgcagtttttggatttaccagcgtggtgaacctcatcataggactggagcaagatggaatcattgacgggttcatgacacactacttgagagagggtgaaccgtatctgaacaccgcatatgggcacatgatctgctactgggatggctctgctcattatctgatgtacctggtgatggtggcagccatagcatgggaggaaacttatagaaccattggcctatattgggttggatctattattatgagtgttgttgtttttgtgccaggaaacattgtagggaagtatggaacacgaatttgccctgcttttttcttaagcataccatatacttgtcttcctgtctgggctggtttcagaatctataatcagccatcagaaaattataattacccctcaaaggttattcaagaagcccaagcgaaagacctgctgagaagaccatttgatttaatgttggttgtgtgtctcctcctggcaactggattttgcctgttcagaggtttgattgctttggattgcccatctgagctctgccgattatatacgcaatttcaagagccctatctaaaggatcctgctgcttatcctaaaattcagatgctggcatatatgttctattctgttccttactttgtgactgcactgtatggcttagtggttcctggatgttcctggatgcctgacatcacattgatacatgctggaggtctggctcaggctcagttttctcacattggtgcatctcttcatgctagaactgcttatgtctacagagtccctgaagaagcaaaaatcctttttttagcattaaacatagcatatggagttcttcctcagctcttggcctatcgttgtatctacaaaccagagttcttcataaaaacaaaggcagaagaaaaagtggaataaaaatattacttcatgttcctcctttctaaattactaacttttgttatactggtactgatattttgtcccatttcactctcttctcatacgtgagtacttaagaatatgtacattcttgctctgcactgtatgtgtgagctatatggtattgtgtaaattttttttgaaggaaaatggaaattcttgagaaacagtttgtttaaagaaatatattcaaaatcatttgtgaataaacttgatcatccatctcaatattgtttgacatataaaataattataagtgtaaaaaattacaatttagtgccaacagtagtgagcatgaaatgaaactattcaaaagagaatatggcctgtgcatattaaaaaattcaaaacagtgaatgcagactggaggagtaacttttgcaaataagatgaatatgcttcattattaaactcaatataaaaggcaaatcatcagaatatttttaaatgttgtttgaaaaatgttttcccaaggaaagtttattatttgctgctgtttcaagaaaattacttttactaaatttttttgtgtgaatttaaacagctaaatagggatcagtaactttatctctatccttaatgaacatttgttttattggtggctggaaatatttctattgtatttctgtgtatatttttaataaaattatttttggcctcttataaagacaaatcttattaaatttgaaacatttcatatatacacataaaacgcttttaaagaaaatttgtgagttgtatattccaattcaaaatgccatctacattccccttatgtttcagtgtgagcaatgaagaggtcttttgatgaattaaatttcattaattaaaaaatacattcaaatattcaaaattaaaaaggaccttttaaggaagaagtattagatcgacatccctactatctttttatgaacttttcatgtttgggattgtatgttgagtatactagagaaaatcagtattcactaaatgaaagaaacacaccaaaaatacaaacagccacctcctcactgtgccctggaatgataaatggactggtgctttcatacccttagctgccatcatcaccatcatcattattaacggccctaggcttttaggtctgctcacattttctcatgtttttattagctctcatcaagaaaaccaaaagaaaatgggatacaaatcaatgcatggataatatcaaattacaaaatctagggtccactgggctggtaaatatgtaagtgtaagcaaatcatgtagtcatctccccatcatcccctacagtgttttcaaataatctaaaacccagagagtgtttaaaaaaaaaaaaagaaagaaaaagaaaaaccctcacctgcacttgattctattgtcagcttgctgtgaacaatttttgctttaatatatgaattacattaatacctcacgttacatatatgaagccaaattacactaacttagtttgcttacaacctcaaatcttactcccagtacacattccaataaatttattctgtaaaaacaatacatttttttgtttttgatttttttacagtaaacttttcaactacaaaccgtgaatacgcgaaagatgttccaaggacaagcattaacaggattgataaaacccaaactgactaaatgtgttctcacaatataagctggcataaaaataaataaaattctctattatcacaatagcaacaataatgtacacataataatggtttaaggatgaatattaactattctaattgtagttccaaaagaaaacagtttattttaaaagtctacatttaaaagtcaatgctttgtctggtttcccatagggctgttgctgattccagctttaaaatgtaaagtatccaccttgagtgcttagctcaaaattgtattggcactgggaaaaaaataaatcattgcctttattttggagtaacacaaaaagactcactaacttcacatatagaaacttagtttgtgtacataacaatatgaattttgagaagtataagctgtcaactagctatttctaatacggaatagatattttacaatatggttaaactttacacatggcctcaaaactgaaggacaattttaatttcgtcttcaatataccaacgttatgtatttaggaattaattcctgggttctgtcacagagaggaaattccattcttaagcattatgttgagtggtcatctaaaaaatgtt

SEQ ID NO: 3406 - protein, 364 aa, Homo sapiens
MSASAATGVFVLSLSAIPVTYVFNHLAAQHDSWTIVGVAALILFLVLARVLVKRKPPRDPLFYVYAVFGFTSVVNLIIGLEQDGIIDGFMTHYLREGEPYLNTAYGHMICYWDGSAHYLMYLVMVAAIAWEEYTIGWVGSIIMSVVVFVPGNIVGKYGTRICPAFFLSIPYTCLPVWAGFRIYNQPSENYNYPSKVIQEAQAKDLLRRPFDLMLVVCLLLATGFCLFRGLIALDCPSELCRLYTQFQEPYLKDPAAYPKIQMLAYMFYSVPYFVTALYGLVVPGCSWMPDITLIHAGGLAQAQFSHIGASLHARTAYVYRVPEEAKILFLALNIAYGVLPQLLAYRCIYKPEFFIKTKAEEKVE

SEQ ID NO: 3407 - DNA, 3693 bp, Homo sapiens
tgagccgtggcgcccctggcaggagcactgcaaggacgcctcccgggactgcaccgcggccctgcgcacttggggcgacggggccaggcgcgggggacggctgcgggctgggagggcgcgcggaggagacaccgctgaggggacgccgctgagggcgccacgcggggggcgcggctgaggcgcctcgaagggcaagcgccaagggggcgcgggcgccgccggaagctggggcggggcgcccagcgggatgcggtgaagggcgagcggcgcggcggctgcgatgagtgcctctgcggccaccggggtcttcgtgctgtccctctcggccatcccggtcacctatgtcttcaaccacctggcggcccagcatgattcctggactattgtaggggttgctgccctcatcctgttcctggtagcactgctggctcgtgtcctcgtcaaaagaaaaccaccccgggacccactgttctatgtgtatgcagtttttggatttaccagcgtggtgaacctcatcataggactggagcaagatggaatcattgacgggttcatgacacactacttgagagagggtgaaccgtatctgaacaccgcatatgggcacatgatctgctactgggatggctctgctcattatctgatgtacctggtgatggtggcagccatagcatgggaggaaacttatagaaccattggcctatattgggttggatctattattatgagtgttgttgtttttgtgccaggaaacattgtagggaagtatggaacacgaatttgccctgcttttttcttaagcataccatatacttgtcttcctgtctgggctggtttcagaatctataatcagccatcagaaaattataattacccctcaaaggttattcaagaagcccaagcgaaagacctgctgagaagaccatttgatttaatgttggttgtgtgtctcctcctggcaactggattttgcctgttcagaggtttgattgctttggattgcccatctgagctctgccgattatatacgcaatttcaagagccctatctaaaggatcctgctgcttatcctaaaattcagatgctggcatatatgttctattctgttccttactttgtgactgcactgtatggcttagtggttcctggatgttcctggatgcctgacatcacattgatacatgctggaggtctggctcaggctcagttttctcacattggtgcatctcttcatgctagaactgcttatgtctacagagtccctgaagaagcaaaaatcctttttttagcattaaacatagcatatggagttcttcctcagctcttggcctatcgttgtatctacaaaccagagttcttcataaaaacaaaggcagaagaaaaagtggaataaaaatattacttcatgttcctcctttctaaattactaacttttgttatactggtactgatattttgtcccatttcactctcttctcatacgtgagtacttaagaatatgtacattcttgctctgcactgtatgtgtgagctatatggtattgtgtaaattttttttgaaggaaaatggaaattcttgagaaacagtttgtttaaagaaatatattcaaaatcatttgtgaataaacttgatcatccatctcaatattgtttgacatataaaataattataagtgtaaaaaattacaatttagtgccaacagtagtgagcatgaaatgaaactattcaaaagagaatatggcctgtgcatattaaaaaattcaaaacagtgaatgcagactggaggagtaacttttgcaaataagatgaatatgcttcattattaaactcaatataaaaggcaaatcatcagaatatttttaaatgttgtttgaaaaatgttttcccaaggaaagtttattatttgctgctgtttcaagaaaattacttttactaaatttttttgtgtgaatttaaacagctaaatagggatcagtaactttatctctatccttaatgaacatttgttttattggtggctggaaatatttctattgtatttctgtgtatatttttaataaaattatttttggcctcttataaagacaaatcttattaaatttgaaacatttcatatatacacataaaacgcttttaaagaaaatttgtgagttgtatattccaattcaaaatgccatctacattccccttatgtttcagtgtgagcaatgaagaggtcttttgatgaattaaatttcattaattaaaaaatacattcaaatattcaaaattaaaaaggaccttttaaggaagaagtattagatcgacatccctactatctttttatgaacttttcatgtttgggattgtatgttgagtatactagagaaaatcagtattcactaaatgaaagaaacacaccaaaaatacaaacagccacctcctcactgtgccctggaatgataaatggactggtgctttcatacccttagctgccatcatcaccatcatcattattaacggccctaggcttttaggtctgctcacattttctcatgtttttattagctctcatcaagaaaaccaaaagaaaatgggatacaaatcaatgcatggataatatcaaattacaaaatctagggtccactgggctggtaaatatgtaagtgtaagcaaatcatgtagtcatctccccatcatcccctacagtgttttcaaataatctaaaacccagagagtgtttaaaaaaaaaaaaagaaagaaaaagaaaaaccctcacctgcacttgattctattgtcagcttgctgtgaacaatttttgctttaatatatgaattacattaatacctcacgttacatatatgaagccaaattacactaacttagtttgcttacaacctcaaatcttactcccagtacacattccaataaatttattctgtaaaaacaatacatttttttgtttttgatttttttacagtaaacttttcaactacaaaccgtgaatacgcgaaagatgttccaaggacaagcattaacaggattgataaaacccaaactgactaaatgtgttctcacaatataagctggcataaaaataaataaaattctctattatcacaatagcaacaataatgtacacataataatggtttaaggatgaatattaactattctaattgtagttccaaaagaaaacagtttattttaaaagtctacatttaaaagtcaatgctttgtctggtttcccatagggctgttgctgattccagctttaaaatgtaaagtatccaccttgagtgcttagctcaaaattgtattggcactgggaaaaaaataaatcattgcctttattttggagtaacacaaaaagactcactaacttcacatatagaaacttagtttgtgtacataacaatatgaattttgagaagtataagctgtcaactagctatttctaatacggaatagatattttacaatatggttaaactttacacatggcctcaaaactgaaggacaattttaatttcgtcttcaatataccaacgttatgtatttaggaattaattcctgggttctgtcacagagaggaaattccattcttaagcattatgttgagtggtcatctaaaaaatgttgccttgataaaaggatcctagacatgtataagtctgcgcaaaaatcttgataatccttagtggttaagggca

SEQ ID NO: 3408 - protein, 364 aa, Homo sapiens; identical to SEQ ID NO: 3406

SEQ ID NO: 3409 - DNA, 45727 bp, Mus musculus
  misc_feature (1)...(45727): n = A, C, G, or T/U
acctccctaaccatcctttcttttggtttaacctctgagaagctgggttcttggttctgttgtttggagtttgtttgtttctgaccaggtctagtagcccaggctggtctctaactatgaccttgaacttctccctacccccacctccagagtgctgggattacaggcatgtaccatgacacctgggttatccagtgctagggatagaagccatggttgcacacatgcccggcaagcataccgccaactgagctacattctagctaggacagcctctttttcctttacattgttctgaccaaattggaacctgcttagtcaccatttgaatagatttggttttcttttaatgtttttaggtgttttgtttgtttgtttgtttttgttttgttttgtttgagacaaggtctccctgtgtagcctggctgtcctggaacccactgtgtacatgaggctcacctcaaactcacagagatccacctgcctctgcctctgcctctgcccctctgccctctgcccctctgcctctgcctctgcctctgcctctgcctctgcctctgcctctgcccctctgcctctgcccctctgcctctgcccctctgcctctgcccctctgcctctgcccctctgcctctgcctctctgcctctgcccctctgcctctctgcctctgcctctgcctctgcccctctgcctctgcccctctgcccctctgcccctctgcctctgcctctgcctctgcccctctgcctctgcctctgcctctgcctctgcccctctgcctctgcctctgcctctgcccctctgcctctgcccctctgcccctctgcctctgcctctgcctctacctctgcctcccaggtgcttgccccccaaccattttttaaaaggtgggaagtatgtcatttgacaaatgatgaaggtataatgagcctctctaaatccctagacaggaaactaagtcagaggaaccatctggggaaataggacccgccccctctactctttctttctaggcttaaatgactataggcaatgtattaagcagcacatactacatacagtgtccacttttgtttgtaacttataaaatcgagctgtttctgttgaatgtaaattttcagtagctcccttgaaaaccttaccatctctggtggcatcccttgctgggctgcagtgacacgcttctgtcctggccctccctagctgtccacttggttcccttgcacaccagggtacagctcctacctgtcgtgaggtccccttccctcaacagtctgcccctcttcgcagggcctgtgctttaatggcagtgccttcgtcttgtacttctcagctgccatagtggacgcatcttctgtctccccagagaaggaagggcacaacttcaacagctgggcagcctcctcggtgagtgagtcctcccaaacaccacccgtatcctccagaaacttcctcccagggccagcctgttcgggatcagggagggggtcatgttatctgcaagattcaaagaccacttacttgtaatagcaacaaaacaacagtcaactggttgatagccaacaaggcattaaaacttataggttgggcttgggttaacatacagcaagaatgagccagtatatggcagctgaggagagtaatggctgaaggtatggcgtgcagttgggacccttgtaggacagagaaacagtgacaacctcccttcctgcatctgaaaccccacctagctcctcctaacagagatgtgcaaattgagattcgagattcatagacacaaacactggctgggtgtatacggcagaggctggctcgcctcgtgtctaagagctggtggcagacactggaggctgagccctgtctaaggttacctgaactagattaggcgcccacagctccatcatgacccctcagtgaactccctgaggagtcctcagacctgtcccagaaactcaatcagtggggccagaacacactagaaaaggaaacagagggagggatggcccagtcggtactggtgtgtgccaccgtacctgatgacctgagtttggtcctagggacctgcatggtaaaaagaaagtggatcctcacagattgttctcttaccaacacatacatcatgatgatgatcatgatgaattttaaagaaaaaggctattgaagcaataaagtgggtttagagaaggaaccctggatcaagtccaaggcagtctgaacaccagacacagtggagggaaacactctttcgagtcagaccgcctgctgaagccctgtctctaccacacttccttctccacagttctttgccttcctggtcaccatctgctatgctggaaacacgtacttcagtttcatagcctggagatcgaggacggcacagtgactctccctcctcagataacagagaagacgacacaccaggacgaatcccactgttattaaaaaaagaaagaaagagagaaagagagaaaaagagaaagaaagaaagaaaaacagttgtagctataatgtatattgccccagaattgtatttaactaatgtttttatatcttagttaaattagctcccagtgtcttgttacaattgagctggatatttacttggggagtgctgtggcttctaatgaaccctgaagtctcctgatgtccttctagcctttatttttcttacacaatgtataaataaattgctaaatgttaagaacatgtggagtttgtaaagctaccatttgagattacatttgtttcgtgtgtgtggatgtgtgtttgtgcatgggtgcgggggcgccaatgtgccacagtgcacgtattgagcccatgggtgcgggggcgccaatgtgccacagtgcacgtattgagcccagaggagaacttgcaagagtgagttctccccttccacgctccaggtcccagggataaaattcagggctctaagcttggcatcagtatctcttctctgcccactgaccccatctcactgtcccaaagcgtgcatgcgtgcctctctctctctctgtgtgtgtgtgtgtgtgtgggtgtgggtgtgggtgtgggtgtgtgcaaggcatcaaatcgctgtgtctggttttaggcagttttgagcttgggttccctgtgtgtggctcgtccctgctgatatctctcccaagctaaggttgaagataccagattaaatggtgccatgcctcagctaaggctgattgtgactgataagggacacacccagaacctgagtacggggcaagctttctgactcacagggatgctcagaagacacttgtccttagtcaccaggacagggtagcaggagagactcgtctcttctgatctgggaaccacagtaccagtgactctcacatgctagctcataccctagagctgtcaaatgagacacgttctcgggctcagcaatgagctcttgcaaaaagtactgccagggcaggggctagtttgttcttaaacacgttaaaataagttaagtagcctttaaaaggatcaataggtacagacacctttaaatcctttagctgagggctgagaagatagctcagttgtcttgccagcagaggacctggttttgattttcagaacccacatcaaaaccaaaaacacttagaatgagcacttcagatgccccaagttcaatacctgggataatggtgcacaggtgtgaccccagctagaagctgggggatcaggagttcaaggtcagcctgaggctacatcaacccacctccaacccccccactccaccccccaaaaaagtcaggcttggtagttcttttatattttggttgtgagctgagcactctctccagccctggtagttatactgccagcactagtgaggcaaagtctggcggactcctggggggttccagtcagccagtacaacctacttgtggagttccaggctagtcagaccctgtcttgcaagaatgaagaactatatcttaggctattctctggaatgcctgtgagtacacacacacacacacacacacacacagagtgttcttgctgaccccagagatgtgtgtgccaaaatgtctccacgtctcaaatcgttatcaaaaactgcaatgatgacaccttctgcagcccttatcagatggagggagaagtcagatgaaccagacagaggcaccaagaggaagtgtttttaggcaggacagttcctgctgccacagcaagtatcttggggtaacctttcaactcaggtttttttttttttttttttgtttttcaagacagggtttctctgtatagccctggctgtcctggaactcactttgtagaccaggctggccttgaactcagaaatccgcctgcctctgcctcccgagtgctgggattaaaggcgtgcgccaccacgcccggctcaactcaggtttttaaaaacaagataaaccacagaaacgtgggcttggtgtcgtgtgcagggctgaaggcgcgctctttcagaatgatgtcctgctggcttctagggctcctcctggtccctgcaaggtgctgattctttcactggtatgcttgggtttgtcctcctgcttatctggttctccatggcacccccgggtcagcctgccacttggaacaatagaataaagttcccatgttactgtccagactgctgctccttgcagtacacccagtaaatgttgcttgctatgatgatctcaatggtgaatgtattcattgtgcacatggcctaaagcagccattctcaacctatacgttgagacccctttggaggtcaaatgatcccttcatatgggttgcctaagaccatcagaaaaccatacaattacttaatggtagcaaaattacggttatgaaaaaaatcaatgaaatagttctatgattgggagttaccacaacatgaggaactaactgtattaaagggttgcagcaacgttaggaaggttgagaaatgctggtctcaaaggtgaatatattcaccatccacaaacccttcctcaccactatgacagctagtcaactgcacgaccgtgtcatcctaaagagaagccaggtgtggtggtctgagtaagaatggttcctataggcttgtatctttgaattcttagtcttttcggagtggcactacttgggagggattgggaggtgtgtccctgttaaggatgtatgtcactggtgggtgggctctgaggtttcaaaagcccaagccaggcccagtgtctctctcttcctgctgcctggggttccagatgcagaactctcagctccttctccaatgccatgtctgcctgggtgccaccgctgatgatactagattgcctctctgaaactctaagccagccccaattaaatgctttctcttaggagagctgccatggtcacagtgtctccttacagcgactgaaaggtgacctggacaccagctatggtggtacaagcttttaagcccagaggcagaggcaggtaggtggttctctgagttgaaggccagcctggactgcataagagttcctagtctatcagggttacaaagccagaaaaaaagaaaaaaaaaagaaaagaaagtttaggcaattcactgtattcagtccctgggtcatcaaaaaaagaaaataaattaaagagtcttgtgtgttatttctctgtcctctcattcactaaagcaaggatgcctcccacatacccactggattttgttaagcattttatactgtagtcaaggctccataaaaggccaaggaaatagaggtgtaaagaggtgtttctgagaaccttccgagagaagcccttttcactgtgagggagatatgatcacgcgttcaggagatgctcgtggggtgaacagtaccacacagccttgggtcgaccgtggctggaaatcccagacaccactgcaaagagcttccaaccttttcctttatctgttacttctcaacagcaggctcataatctcccctgacagctgagcaaaacaataaacatatttttaaccaaaagaaaattttcttaaaaacaataaaataaaataaaataaaataaaataaaataaaataaaaagagacctttctggtgaatcatctcaaaatttgcacttttggattacaaaatgaatccagacagctggtgtcaacaagaattcctgcgaagaagcaacacctgactgatcaggactgcagtggggagggggcgttggaatgttgcaggtcctgtgatcattgccttatcgcagactatccaccccggcccgctcccatgcaattcctccgtgtctggttagcaacttaataacctttgagtaataaactggaaatccctggaatctgctaacttagcagatcacaggcttccctgacccaaaagctaagaatgtcatcctgcagcgcgggaggcctgtagaaacttttcactagcctgccgagagctgcctttctctgaggcatccactgacgcattctaagcgtcccttgacgtttgaccctttttctgtaaaactatagaactgctgccataggaaacatggagtttgggttaacccaaactgtgttccaggaccatttatggtcactcaaattggctccggaatgaaaaagctctagccagctcgagcatggcaaacgtgggtctggcaagccttgcccttcccccattccctctgcccggggttttagattacattcctaacgctagtctactattcccctatttgactacttcctcctcctgaggctgaggtctagctctacccagagtccttttctcaccccaccccaatctgggacaaatgcctttcccttctcccttgttcccttccccttcttcctcttcatcagtctttgtctttgtctttctggagcaaatgaatctcctttgtgctgagaatttggtgttgggcctcctgagccgatccagaccctttcacagaataaaccgtttctaattctttttaagatgggagctgtgcttaggggtggggttctttttgttttgtttttgaactagatttgattttttttttcttgtttaaaaaaaaaaaagcaagtatagcgctgatagttttaatgctaggatataggactgccaaccagccagagctacctagtacgccctgtttgaaaaaaagataaaggaaaaggagggaggaagcaagcaaaacaaagtgcactggcagttatttgtgacaattccatggtaggctggcaagatggctctgccaatcaaaatgtttgccaccagacctgatgacctgaatttggtcctcagaccactatgaagtgaaaggagagacctgtctcccataaattgtcctctgagctcacacacacacacacacacacacaaataagagtaatacaaaggtctttaagataccaggatgaaacctgttactttggtttacctaaaaatcatctctcccacagtttgcgctgaatgccagagcctgcctcagactttcctggcctctgagatggaactgggcagatttctaatttaatgtgtttacctactctgggcaaatcaataaaatgcttggggcatttcaactctcgccattgctatttccaatccatctcctaatgataaatatttggctagtatttgaaaagtgtaagaaagtccagagatgaaatgttcaattgcaataattcattttcagatttttaaattgctcccttcacaagaaaaaaatcccttcagggtattagcacagaaaaggattctaaatgcaaaacgcatctctgtttgaagcactaaaaatccattcaggtgaaaaacgggttcaaagccagtctttctagccccaaggcaattagtctaattttaatggaaaagatggcattttgtgggaaaatgggcttttttttttaatgtagtgggaaaaagtcaaagaaaataacatgtaatgccaaggtataagcacatgtgtgtgtgcacgatgcacacacgtgtccactgcacacgtgtgcacacaggaagagctaacctagaaaggactcatgttgaggtgacgtctcgtcgagttaaagtgctccctgcacaaacttgaggacctgagctctgatccttgcacccacacagaaagctgggtgaggcagcagggcctgcaacccctgcactgcagaggcagagacaggagaatccctgagacttgctgcccagtctagccttcttgacgagccctgttagaaatgaaatctagctgttcattttcaaagatgcctggagccagtttaggtcctgctacaaaataataataataataatttataaataaataatttttaaaaatcaggctcctgctaatgcctgctggtctagctgtcacctgcaaccaaaccctgctcagttacccgcccaccctctcctgcccaaactagaagtttagagtagaaaattgctcacagccaagcttgcctgcacagccgtgagtctgacaactttaaaataaacaacatacagatggtgcacacctttaatcccagcactcggaggcagaggcatgtggatctctgtgagttcaaggccaggttggtcttcctaccgagttccaggacagccagggatacttagtgagaccgtgtctcaaaggcaagtacacaaaaagtgacctgtaagcaggacactgtcatgggcagggaaggtttgatacatctgatacggttgatgctgtaagctgggacctatgcaaaggtaggtacttagaatacatgagagaagaggagactgtggggtttttggcgttataaggggtaaccattttggctgagcatattagcaaaatgtatagtctgatctctggccattttaacttttgatgaggcttcaatcttgttgactatcaaaacaaaaaagttttccttggactggagagatgactcattgaatgattaagagcaccagctgctcttccagagaacccaagttcaattcccagcctgcacatggcaacttaaaactgtaactccagctttgtaatttcttctggcttctgcaggcacccggcacacacatggcgcacagagctagatgtgggcagaacacccatacacataaaataaattcactaagttaaaaaaaaaaatcaaagaatctattttttaaaaaaagtcttaggcagtagtggcacaggcttttaaccccagtactggggaggcagaggcagacagatctctgagtttgaggccagcccggattccagagtgagttccaggacagccagtaatatacagagaaaccctgcgtgtgggcagggagcataaattaggactaacctggtgttgtttgacttctaacactgagacaaacaaacttctattcaccccaggtccaataacagaccaggaaaagaaaagaaaacattccatcatgagacaaaagaatctctcctcttttcttaggctgcttttatcagacattttctatgtcctgagatagacgaatctctcttcaccgaagagtaaggtagacagagtgacagagcaggacactagacatcctccactggcctctgtatacacacacacacacacacacacacacacacacacacatacatacttaaaaagatgtactgcgatgctgagagtggtgtcctgattagctttaactgtcgactttgacagtgcctagagtcacctcggttgggtatggtatcattccagcacccgggaagcagaggcaaggagaatacctgcgagtttgaggctagctgggtttatacaggagttccaggttagccagtggtacacagtgagagcctggcgttgtttgtttgttttgtttgtttttgaggcaggatctctctgtgtagtcctggctgtcctggggctcaccatgtagactaggttgacctcgaactcacagagatcctcctgcctctgccttcctagtgctggaattaaaaataagtgctacccaactctggcaagagagagtatgtttttagaaagaaagaaaaaaaggcaaaaataacaacaacaaaaaaaaataataagaaagaaagcagaatggtgggagggtgggggaggaaggtcctgaggcgatggacctgtttttattgctgtaggtgatggtggcacaggtgcgtgccccgtgcacacacacagaagcagaaatgaacagcgcagcacggtatgctcagggcatttccccctactcgtgtcagtacctagtagcagccgcacccacacaaaaaatccctggaggctcatcaccagctgtgacctgggcggtgcgctcctgggagaggccagggccccaggcgtccggtttcctgcccacgccagtccaacttccgcgtgtctagagggcaggggcttgcggggcatctgctcccgagtcctctccgggtccggccgcagctgggaagagggagccgtgcgccccgcccctgaggctccgccccgtcccgtcccagcttcaccggccagaggtccccgggcctcggaggcggccagcccgggctgggtcgcgcgatgtctcatggatcggggctcgtccggaccacgtgcagcagcggcggcgcgctggggccaggccagccctcggagggactgctggaccgggtgtacccgctcacccacggcgccctgttcaaagtggcgcagatggtaagaagagtggagtggaacctggggacccgtacacggggctgcacctggcccggaccttgggagcaccgcgcgcccctttgatgccccagtgtccccctagaaagttccgggaacagccgacaggatccctggccccctcacttctccagctgcctccctaccgggcccagctcacttccccaccgaaacccggggtgcgagttcctcctcgtcttccttcctcttctccaggccgcacgtctcgcacccgggctgggggagggagagtctcctgctatcccctgccatctccaggccgcgcacgggctcccgcccgagagggtagagctcggcgacaagagggctcggcttgactttcgaatctctgctggggatcgggagaagcgccgcctttcagaccatcgccaggtcccctgcgccctgtcagccttccgaggcgcctcagaaggcagaactagttaactaggttaactaggcaggcttgtggctagggggcttctggtgctcgcttggagccaggcagggcaaggcgagcagccggctgttactgtgaccagagctgcacaaaagcttctggcccgaccagaagtttaccaggcctgatcctgttcgctctctacccacccttcttttttccctcccgtttttgtttttcaacctctgtgcaaatgtctcgtctacaataccttttctgtttgtgtggtgtgttttgaaactgggctgggccgtttgaattccctacttatcatgggtggagaggggagtggtggaaagctgcggagaccccagtgcaaggtcacagacccggaagctgggacctgccagcgaagctggagcagcctaccccccccacccccccggggctggtacagggccagagctttgcgccttccataaccgttattttggatgcctagagtgtagaaaggtggctggtattccctgccgaaagggaggaagacgttcccgcctctcctgagaagggtgcctaaatggaccaagattgggacacaggcagttttaatacggaactaaaaaggtctggtgctaagcagtcttggatttgagtggatggtgtgtgggacccaggctaagggctttgatcagccaaataaaagcccgagaggccacctctttgatcattaaaggatggttggagtcaaagagactttacagtcttacgcccatgcggagacgagggccgcggcagagatttggatcaggccttgatctataagggaagccgatgggaagggaatgcccttgctgggctgtgacttgggtgcacaaaattaatggcgatgagaagcattaatgctggtccgtgagactgaggagcagggatacttactgtgtgctttagatgacagtgatatagagcttgtccaaaatcagtgagcatggattttaaccatgacgtcatgggcccgccgcctctctgcatgctccagttaaaacccccgtacaaagatgaccaagtcctgggagtgaggctgcctgcttggccctggctggctcctgctctgccccgcaactctgactgggatctccactgacagaatcctctgcttatctgttgagggtgaacagaagcagatgcgctgtgagcgcccttggggggggggggtcacaatcccaatttgcccgtggctcagtgacatacagacctctggttctgtgaagtgtttttagcttgatctgaccaagagaattttcaacatattaccttaagaaccagaaaggctggggttgggaagatggctcagtggttaagactctgtaccgctattccagaggtcccgagttcaattcccagcacccacttcaggtggctctataactccagggagatttgatgcctttgactccctctggcacctgcattcacatgcacccactcacacacagatatacgtacataatttaaaaactaaggacggccaaggccaaagccggggctgtagctccattggtagagtgctggatcagaagagccccgtgcccagttgtgcaacctatatattgggtatggtggtggatcctgcctttaatctcagaacgcaggtggtagaggtaggagactcgggttcacagttattctcatctacttaattctaggccagcctgggctacatgggaaccttggcgcgcctctcctccaggccgaattcctgcagctgggtcctcacgctccgtcttcctcagtagtcagtgccttggtcgctggtcttgactttgaggtgtctttttgttcatttgtttggttttttatccaaacagggtttctctctctgactgttctgaaacacctctgtagaccaggctggccttgaactaagaggtctgcctgcctctgcctcctgaatgctgagattgaaggcctgtactgcctctccttttttttttttaagccatgtactgctcttaacaatgcacagggaactgcatactctacaccttgactgcatcatttcactaaatgtttttaagggatggagagagctatgtctttgactagtaaggaaaccgccttaaggcagtatgagcgcctaaagccacactgccagtggcagcagcccaagtccggttttcaccggtatccgctccttgcatccccagaacacataattctggcagagtctgaacttgctaatgatccagagaaatctaaaccttggtgaggcgaggtcacacacaagacattgatgataatcgaagggacagatgacaagtggcttgggggcaaaaggagtaaagaggttggaactctgggatgcttgctgaagatggaagcagggaaatgatgcagccattgtagggacagcctgcactagcttaggagttatgtcacacacagcatggagacctgagtctgtgccccccccacacacatatacacacactatacatacacacacacacaccacacacatactcatacaacacacacatatacacacaccatatatacacatacacacacacaccacacacatatacatacacacacacatatacatacaacacgcacacacacacataaaatgggagctataggaccagtacttctgctagcccaggagaagtgaaaatattatgtacacagatatattcattttcattgttcacaatagccagaaactagaaaccacagacaacccgccaaacgttgcatgaattaataacagaaacaaaaagtgttacatttgatgagttattatacagaaaaaaaatggggaaggatactgagttatggtactgtatgtgagctttggaaacactgtgctaagagggaggggaaagccactcatcaaaagatcatgttcaatgattctggtcagatgaagtattattgaaaataggcaaattcatagacacggacggaaatcagcgactgctcagggctgcgctggggcactggcggaaggaagttggaagtgactgttggtgggtgtgaggtttggggtgatgactgaaacggttaaaagttgtggttggtggttagacagccgttgagaggatactaagagccgctggacttcacacttgagatgggagttaagactcagccattaaaaaaaaaagtcttacagaggcagttggtgggggggggcaaagaacactttggacagcctccaggtatgggaagcagggctatatttcagggacacccacagcctgccgagcctcacagagtgcaggctgatgggccagttttctggtatcaactgggtgtcctccatggggccagccagagctgaaagggaacaaatggttagctttgtggttctgtgaactaggagtgagtggtgtccagacctggaatcctagctactcaggaggtggaggcaggaggatcagaggttcaaggtcatgcatgactacacagagtccaagaccagactggactaaagcagaccctgcctgaaggagggaggcctggggtttgcataccttgaacttcagtgcttccaacttgtggatctcagagttcaaggccagcctggtctacagagcaagcaccaggccagccaaggctacataatgagactgtctgaaaaaaaagcaaaatcaataaatatagggtaacacccctcgaatcttttgttataatagttaaaggtctactcagacctcatccaagtgtgagacctcatcttccaccaccagaaatacagagaccaaaaggcagcaaagaaacgcattgccgaggttctgccccctcctaacccgctcctgacctgaggacaggaagctttctgctgaaggctaaagcaaattttaaaaattgataacaaggctgtagagatggcttggtagttaagagcactggctgctcctcccgaggtctccagttcagttcccagcaaccacatctgtctgttgtgtgtgttttattcttcctaataaaagtgatttttttcactgtgcataccatccaaagcacaaagaagaaagtactctcccattctctttcctctaacattagcagtaagagaaacttcttgggattttgtagaagatacatatagttttggtgttttacaccaaaactagaaggtgctggcttctttctggcttactgaacgtatcttgctgtgtggcttttaaatctctgtggaccgtttttctgagtatgtttgttcccgggtgtttatgtgtgcaggagagtgtgtgtgtgtgtgtgtgtgtgtgtgtgtgtgtgtgtgtgtgtgtgtatggagaccagaagtcagcctctagtgtcattaggaacctgtccttgttttctgagccagggtcccacactgggaccgatagcttgcagattaaactagagggctggcccaccgccccagtgctggggttacgtgtgcttgtcacggtgcctggctttttacatgatcgatggaggtttaaatcaagtccgtgatggtgtgaggggcaagttctctaccaactcccgccccttgatctctgctccttcaaggcagcctcttaagcatctagacctagattagcctcaaactcatgatatagttgaggatggccttgaactcatgatcctcttgcttctacggtcagagtgctgagatcacaggatgccccagcaggcccagctgcagtgtggtttgcagccaggcatggaggcaccatgattcatgttacagcctcccctgtctccccttcaagttcactggcttccaggcctgtttgtggaacacagggccttagtgcccttccctgtagagaaatcttgatggacaaatgtgccagtagttcatcaggatacatgccacctcccttctgcagagagaaaaaccaagaactttgtgcccttcggagctgggtggtggtgaacaattttctagactggcctcaaactcaacagagatccgcctgccctgcccccgcctcctgagtgctgggattaaaagcaacaccaccatgccctgacttaactagactttaaaaataatatttattttgtgtgtgtgtgtgtgtatctgtgtatccacatgaactcacatgtgcacatgcacacacacatccgaacctgatctgtatttcaggcctggagatttttcagtgtctacacattaatggcttgtccacagatttcaaggtgccaagtagaatagtagccataattttaatcatgaatttggtgcctggcattctggaaaaggaacagcgactggctagtcggtcatgctttgaaatgcttctgtatttaattaatgttgacgatgactgtggaaagttctagaaggcagagagccccacaagtaggagatgtcatgtcccctggaagagctagctgatgctgtgctgggaaccacaaccagaggtgaaataacacctcctagaaaaggagggtgcaccaggccacagggctgaataggggaaaaggtgtggggtcccctatggtgccagtggttgggccacttaggtgccaacatgcccacagatttttgttttgtttttaaataatctagtgggtcccagagacgtcctgctccctcttgctttgctgggagcggcacccgggaacagagtagtccttcagattctggttggtagagaaggcctctctctctctgtctctccctgccctggtttcctgcctggcccaatgcatctgtttcctccctgccatctgcctaccgcctgtgcctctggccaacctccaccctggctgccccatctgacctgccagcagccgctttgccctgtcaccagcctggctgctcactggctggctgcagtccctgcatctctcacaggccagcaaaggcattctgggctctacagagcttggacccagctgggagcctgagggactcccagaagtgacagatcatgcctgctcaacttactccactccttgtggggtatctgtagctgctgaggcccagcctccaccagacagcaggtccccagctcatgctggcagttagcaaggctgagacctgagggtaagtgttttctggggctctgaaaggacagccatgagactcgggagaagtcctttcttatcacggagatggatgggaagacaggaagcaggggagatgagaacctgcagcaggacctcagggctttcattcccaccttcctgaacagctagctggaactcccatcttgcttaggaagaagcaaaacaaacgaaagcttttcaccacttcactgtagaaatgcggccgttaattgaagatgggctggtgagctgggtgctttctcctgtatccttgctaaactctcactgcctcaggaggttatatcccatgcccttgtttacggatgagtagcaaggccaggagcatcatcatccatccatggcctggaagccttgactgagacacttggatttgggccaagtcggaatccagaatctaagctttttttttttttttttttttttttttgagactgggtttcttgtgtcaagcctcaagcttgctatgtacttaaatataaccttgaccttttgaccctccttcctccacctccagaattcgaggttacaagcataagactctgtgggcagtctttgccttacttaccaaccccaaccagagcggtcttccccagcccctgcctgtgtgagtctttttagatttgtttctgtttttgttttttatgtttgtgtacgtgtgagtgcctgcatgagttaagtgcaccaccacaggacctcagatcccctgaaactggagttacaggctacgggcagctgtgagcttgtggatgcttggctctgaacctaactccactggaagaacagtgggtgttcttaaccactgagccatctctctctccccggctcttcaggtttcctctttccctttctctttggataaacaagcattgagatcattatgactttccccatgttaaaaacaaaaacaaaacctattgaattctgcccctgcactggaacctgaccagggcccaccaaggcactttttctcaccaagcctgcagcttttgtgtatggtgagcaggctcccccaggcctgcacaacgtgacagacacagccttggggtaccccagggacacacagtcttgtgtaagtgcatcctgggtgaaggtggacttcctggcactggtggatggcctagggtagggggatggggcatcatttgtaagtacctcctgccatcccggaggtgaggggtgctaagtgcagcacagagggtatggagaattgagctcatagcagcatccctagctgtgagagagagagagagagagagagagagagagagannnnnnnnnnnnnnnnnnnnnnnnnnnnnnnnnnnnnnnnnnnnnnnnnnnnnnnnnnnnnnnnnnnnnnnnnnnnnnnnnnnnnnnnnnnnnnnnnnnnnnnnnnnnnnnnnnnnnnnnnnnnnnnnnnnnnnnnnnnnnnnnnnnnnnnnnnnnnnagagagagaagagatgccctggaggatagagggacccaaggcatctgagcatggaggtggattccctgctgtgttctgtggaagccactagagccgcctcctgtccgtctctttcccacagaggctctgccagtgtgtccaggcttcacactgtggcagatgctgccacacagtaagttcacaccagagaaattgagtctctctctctctctctctctctctctctctctctctctctctcacacacacacacacacacacacacacacacacacaccatcagtctaaatgatgttttaagttgatagtttgtgtcaagccatgttcatagctatcctggggcacaggtggcccactggctacaagttggacacaccccccctgcatgtccctgtctgtgatcttggcttgtctgctgtcttccctagtgtccctctggacccaaagctgcagctgcagatgccctcaggacttcccatgttacatttgttacattccgttgtcctctgaaagagctgtgttggctttttggggtgtgtgtgtgtgtgtgtgtgtgtgtgtgtgtgtatgtgtatgtgtgtgtgtatgtgtgtgtgtttcccaacttcagtttaaaataagagcaggatggggatcaatatttactgagtgaaaaataaaatcgatggggaagaaaattatttcaacagcctttttctgtttcaacaatgctagagtaatagcaataactgaatctctgtgtgtgtgtaccagcaaggtgcatatgtatgcatatgcatataagaacctcaggtgtccttagtcactgtctacattttacttatttgtttatttatttattctggagacagggtttctctgtgtagccctggctgtcctagaactctctctgtagaccaggctggcctcagactcagatatccttctgcctctgcctcccgagtgcatgtggcactcctgcccggccattgttcaccttttaagacaggttctctgtctgaacctggagttcacttgccaagtgtgtcccaggaacctgtccgcatctccccaacactggggagtatggacggccactcctggcttctttacacaggtgctgaggatcaaaccctgccccacaggcttatgcagcaagcactgtgccaactgagccacctctccagcctcttcatgacatcatctttaactccttgtgacaacctgaggacataacaaatgtgtccaggagtacgggatatgactgccagagtggggactgtccccccgtacctcctgctgtttcagttggaaaattggaaaggctttactgtgttgccacagctggcctggggctgacaatccaatcctgctccctctgtaccttgtgccaccatccctagggatgacactgtttttccaagacttcttggtcagggtgtcctgttcactacatgacactttgagtagagaaaagaaatctgggcaagacacatgtggtggtctgaatgagaatggcccgtgtaggttcatttatttgaaggcttagtgcccagttgatggaactgttggggaaggattagggggtgtggccttgttggaggaggtgtgtcactaagggtggcttttaaggtttcagaagcccacaccattccagttggctcactctgtgccttgtggttgctgtctcactgtgtagggtctcagctactgtttcagtgtcatgcctgcctgtctgctgtcatgcttccagccatgacggtcataggctcaccctctgagactgcaagcacaccctcagcaaaatgctttcttttataagttgctttcgcctgggtgtcccttcacagcaataaaaaaggaactgggctgaagggctgtcttggtgataaagagcacctgttgttcttgcaaaggagccaagttcaattcccagcacccacacggaagcctgctacctcctcaggcaccaggtatgctgtggtgcccagatgtgcatgcagggaaagcactcatatgaataaaataaattttaaaaattagggaggtaattaagacagcacacgtgtcctgatgaggtcccacaaggccaccctctgtggtgacgactgttctgagacatgcagtggcttctcgcacgtcagcaggcaagcctagctgtaattttccactctaaacgtctagttcagatggggtgggataatttagcagagtttggtgggaaggaatagctggactcgtcatcattagcaagacctggtgtttgccgttcatttgttgcaggacctcagctgaaaatgagccatcagattttatttctgaaagggggacaagagagattttcctcagtggtgtagcccctggtaaattgcctgtgcttcaggaagtaaccctacttgtgtgcgtgtgtgtgtgcgtgcgtgtgtgtgtgtgttcgtgtgcgtgtgcgtgtgtgtgtggtgtgtgtgtgtgtgtgtgtgcatgcgtgtgtgtgtgtgttcgtgtgcgtgtacgtgtgtgtgtgtgtgtggtgtgtgtgtgcgcgtgtgtgtgtgtgtgtgtgtgcgcgagtgtgtgtgtgtgtgtgttcgtgtgcctgtacgtgtgtgtgtgtgtgttagcatagccaggagccatggtgtcacaagagctgaaggaggaagagaatgttgggctggagtccacagagaataaggttcctccatcttcatttctgcccagggatacagatttctggttgctggcttccagaactgcaagggaatcgacatctatagggatcatttgttagagaagccacgagagactcacgcagcccagtaaaggcttgcagtacggccagattcggaacagcgtcaacactatacatctaatatgctctcctgggtgggcttcccttgttcccagaataagcctgccagcagctatggccagcctctcagcccctctgaatggctgttatctctcagccctcttggaacacattatggcctttgccaagaaagctgcaccttgagatggctgctgagaacccaagaagaaagagaacaccagagagcagtttccagaggtcctgagttcaattcccagcaactacatggtggctcacaaccatcagtaatgggatctgatggcctcttctggtgtgtctgaagacagctacagtgtactcacattcataacataaataaaaaaaaaaaaaaaaaaaaagatgagctgcaggcctggggagatgactcagtgaataagggcacttgcctggagacaggagttctaatccccaggacccagcatgcctctagagatgggccacagggctagccttctctttgaaccagttgagagtgagtgacagacagtcctgtcactcacaggaagtcaaagcactgacaatgttacttgagagccttgtcttactcaggcttcaccacaacccactaacgtccttctgctctggggccccggggccacatgctcacatgtggtctcgttactgaataagagtagtcaggtctcttcctcaatctagacacttttttgaattagaggtgtgtaccatcccacttggtttatgtggcaatgatggcggaacaaggacctggggctttgtgccaactgacctacattctctgtccagtctttttgtcattaagttcccttttgttgtagcattacttacagaagaggtcaatataaatgcctcccatctctctccacccaattagtttaagacagggtctcactatgtagcctgaaactatgtagaccaggctggcctcaaactcacagagatctgtctgtgtctgcctcccagggttggggttaaaggtgtgccaccatcacaggtggccccaccgtattattttctggggcaggggctttttgagtgtgcctggatctcactcattctgctagactgactggctgggatgccacctctgtcagcactgggatcacaggtatgcacggatgctgcggacagatctcaggtcctggcagctgtgtagcacgcacttctctgactgagccatctccccagcctctcaccgttgactgtgtcccggggagtctcttctcttcacatgaccacacatgtgtctctgcttcagcccaatccacactcccttactcaccattggctttgcagtcagccttcaaactggatagtgttcatctgcagaaccgagattattcctacattaccttcccgtataaattttagagtcagtttgtcaatatctacctccaccacacacctcacccccccccccccaccaaaaaaaaaatatgctggattgctgggtctcgactcagattctaatgaactggctttatccgttctggggagaatcacttaccgacaatgcagtgatattttcagcaaacatctctctagttgctgctgttagaagtggtcttagccaggtgtggtcgaggccagcctggtctacagagtgagttccaggacagccagggctacacagaaaaaccctgtctcgaaaaaaagaaaaaaagtggtccttgtttttagtatgcaaatttcaattttgttgctcacatataggaaggaattacggtagctcttgtgagtagctctaccacctgcaccatcaaggaactcatggattcattggattcatcccagaaccttttttgtttttgagacagggtttctctgtgtagccctggctgtcctggaactcactctgtagaccaggctggcctcgaactcagaaatccacctgcctctgcctcccaagtgctgggattaaaggtgtgtgccaccacgcccggccagaaccttccttttgagttccactggattctctgcagacgtgagcgcgttgtttataatagaacgctgtgcttgccttttcaatctttcccgcctcattcctgtttcttaccttgttacagcttcagacagtccgttctgggcggtgagagaggacatcttttccttgtcaccccataccctcccctgttctgaggtgcaagcctacagtttctcaccaccgagtgcacaggtagctgtgggttgtagcacagttatcaagttaggttagtgggttgtaccacacttaccaagttaggttagtccctcagatcctagcttacgcggagggttctttgctttgttacttagcatggctggatattgaagtttttgccgtctgttttttctgcatcggctgaccggaacttaggctgcctgccccttgtgtctgtgtctctggtgtgtccattgaaatcatttgaaactattaaaccagccatggtgcattcccaagacgctctgtgttcccatttcttctgtgttgcaggtctgatgtgctcagatgcagtcagggacaggagctccatagcataccgccattccttctgagaacatatgaacagtttgcatatgaacaatcagtccttttccctttctgtgctatgatttaaaaaaaaaataacaaaaaactttttttagtttttaacctgtttctcggtcctgccttgtgggggtggaggggatgggggcggggttagaaggaagcctttgctcctggtagcaaggtcaatggcgacctcgactggccctcttacggagctctccgccagctgtcaccctgaggactgctggcttgtgtcccgttcacctgagctgtgcacttctaggtggatgagtgcaagcgttactgaggactgaccaccccacttcctcccagcgctcccaggccaggggcaaggctgcctgtggagactgaaaagccttctttgtctttttccccagaggccttgacagcgatcaggcagcctcagagtgaccctgcaggccagtgaagggagcatgtgggctagccagggtcagccttcccaggttatttttaataaagtggaggccaagggagtagagatctcactgaagggaggccgttgtttgcacagaactctccagtgagaagaacccagacaagggccaagagggccaccttccactgagcctgggcacagcactcagatcccagacccatcttgctttcctgtaaggggtccttataggcttcctgctcctgagcaggcctgtataagctaggggcgcagaggacagaagctgcccctccgatgaacaaggctgcctgctggattgaagtgaggaggcctgagtcaatgtcattggtgcttggtttgggggaggatctggactcaatttgaaactgttgtaaaagctcagaggaatctgagggggtgggggtggggaggtgctgttgtggcctgtcacatggaattgagtttgtgtacccaaggagctttctgcatcactgtgcacagcagagtccctccccacacctgggtgtgtgtgtgtgtgtgtgtgtctctctgtctctctgtctctctgtctctctgtctctctctctctctctctctctctctcacacacacacacacacacacacacacacacacacacacacactgttataggaacgattctatgtgggacctggcaatcagactcgggttctcaggcttggcagtcagagcctccagcccctgcccccagcttcaggctcctcttctggtctccacggtgggtgaccacacatgtagtaatagtggctttccatctgttctccgggccactggcctgtcacggttcctgtgtgcttgcttggtcacttttcatcccggacaatttcctctcctcaggctagcacaggctcggctccaggctgcttcagtttttaatcaaggcagcctgcaacctcattgtggggctcagcgggcacacacttctggcgcttgcccaaggctggatgccaggcgtcttacagggactgactagcctctcagattctctaaggatttattgtcccaccatactgccgcagcaccagccactccactgcgtgcaatttgtccaccatgcttcctaagcaagctccctggcaaaatggaagccagtgtggccttttggtgtgtggtttttgaaatgttatcattagtgtgtgtgtgtgtgtgtgtgtgtgtgtctgtgcgcgcgcgcgcgcgtgtgcataggcatgtgtcccacagttcacgtttgggaggtcagtagacaagcaagtggggttagttctcttttcccacttcttccacaggttctggagtaggcggccatcataggcctgcacgcaagtgcagctcattagttgatgtttttgagatggagtctccggctgatcttgaactcagtaaccttgatctcacccctccacctcccagggctggaactaggcttgtaccaccatgcctggttttaggaagtgttgaggattgaacctagggtcttgtgagaattagcacgcattctgccaaccaaactacaccccagctcctacgtggttttcgtttgtttgtttggttggttggttggtttggctttagttttggctcactctttagcactgactggccttgaacataaagcaatccttttgcctctgcctatgctgagattaagggcatgggccaccatgcttagcttcagtgtaatcttatgtcatggatgacaaagattggaactgggggtgagccgggcatggtggcacatgcctttaatcccagctctcgggaggcagagagaggcaggcggatttctgagttcgaggccagcctggtctacagagtgagttccaggacagctagggctacatagagaaaccctgtctcgaaccccaccccaccccccaaaaaaagattggaactgggaacgtcatgcatacacaatgagtaactatcaaataaatgtgttcttgttcccatcctcaaagcaagggtagactggccttgaagttaagctagttctgaaaatcgacgtatcagtcagctctgctgtgtaacaaataggtataaatccgaatggcacccagtaagtacttactgtggctggacagggtcttgggacagccctgcatgtcatgagcctgtgctcctatgaatcagggctggctgatgtcccctgatctgggcggcctttagccgggtaatcagaatggctttgcactatcccagagcgggatgtagctcagtctttagagtgtttagctggcacgcaacaagttctgggttcaatccctagtactgcataaaacaggcatggtggtgccagcctgcaatcccagagcactggaagtgaaggcaggaggatcagttcaaggtcatccttggctacttggtgagttcaaggtcatccttggctacttggtgagttcaaggtcatccttggctacttggtgagttccaggtcatccttggctacttggtgagttccaggacagcctgggctacatgagaccttcgtctcaagggaaaaacagaaaagtgaggtgaactgcagttagagcaaacccaggaccaccagcctttccttgtggctctttactttgtatgtatgtatgtatgtatgtatgtaagtatgtatgttgtgtgcacatgttatacatgcatgtgcatgcatgtggaggccagatgttctctctttctaccgtgtgggtccaagggactgaactcaggtcgtcaggcttggcagcagtcacctttacccactgagccacctcactagctcaaggagaggtcacatttaaggtcatgaagtgcaaggtatagagtatttggtactaaatcccacttctccaatggaagcatccacgggagtgtggaggatgctggaggctgacatgtctttctcctgctcctgaatgtcacagtggctgtcattggcctgcagcagagctcagctctataggcctggcctccaggcagccggtggctcaggtctgtcacccacccagggctgtggcttagaggaggggttaccaggctgttccaatggttccctacctacacagggctgtcatgtcaccctcaggacaaggttttctgtggctaaggttttcagctcagctaagcccatcccagtggtggctctggccaagagacattttaaggcgggtgcaggtatctcctgacatgtacccatcattgtcctttgaaagagctcggcttttcaagcaaagagtcaaaacataaaacccagaacaactcatgcattactttcaaaacatgccaagcatgtgtgtgtgtgtgtgtgtgtgtgcaattgttttattaattaattagttaattaattaatttatgagacaggatgtcactatatagctctggctggcttggagtttgctatgtagacccagtcagccttgaactcgtagagatctgtctgcctccagagttaaaagattaaaggcaaaccctgtctcgaaaaaccaaaaaaaaaaaaaaaaaattaaaggcgtgcaccaccacagagaccagacctgttttaaacgtacctgctccagggctggagagatggctctgcagttgagagcactcattgctctctatcagacaactcgagtctggttctcagcccacagtcatcaccaactccagctccaggggatctgatgctcttggcttcttcaagtaccagcccacacataattaaaaacaaatcccttgccaggccagtggtggcgcacgcctttaatcccagcacttgggaggcagaggcaggcagatttctgagttcaaggccagcctggtctacagagtgagttccaagacaaccagggctacacagagaaaccctgtctagaaaaaagaaagaataaaaccaaatcccttaaaagtgcctattcctgggccagcgagttggtccacactgactactgagaaagttagattctctcagagctggcttttcctgaagaagggcacacacagcagggcaagggctgaggagatggctcattcagtccagtgcttgccaggcaagcgggagggcctgagtttggatccctggaagccgtgtaaaaaagccggcatgtacatgtagcccctgggacttactgcctgccagtctcgaatcaggagctttaagttcagtgggaaatcctggcttagaggatatgaaatgtctacctctggcctccacacaagtacacacacatacatacatacataaacacacatgcatgcacacatacatatacatgtatacacacatacatacatgcacatacatacacacacacacacacatgcatagtgcatggacactgatttaaatatgttactgcctataagatggagagttggactaattaactctgcatacctcagtttccctatatgaaacaaaggatgacttttgtcacctggcagagttcttcggtgcttcagctggatcatgccacatgccagtcaataataactcagtgtgcactcgctggtaaggacagtggctgagttactccctttgcagccggaagcagccgactgttattttagctaacatgcagcccaggcgccccctgcaggtaccttcaaacctccagccaattagcgtgggaataacctggattgttgcagcacatcgcagggacagctcagctggtttcccgtttgccccctcctcctgggtgcccgagcagacatgtgccaacatctccatatctgccacaggtcaccctgctgattgccttcatctgtgtacgaagctccgttccgatcgactatggtgcccacagcttcttcgaagtcgtcaccatgtgcgacctgataatgatcctcatcttttacctggtgcacctcttccgcttctaccgtgtgctcacctgcatcagctggcccctgtcggtaagagtgagacttggccccactatcagaatgcaggaattgggacgtggccacttgtttcttcttgtctgcccattccacatctctagcccccgaccgactctggtgcttccacagacatctctgcctgcttccccggggtttctcaagctcccttccagggtcagaggcccggggctcctctcagcatttatctgttgtgtgtggagagttgttgcaggactgagctggtgaggatggtaatgatctatgccactgggtgcacggttgggagagttgaatggtgacacttagtggctgaaacacactggcagaggctgagaagataaatcagaagggctctgtctcgaagacagtactgtgtaaaccaggctggccttgaactcagagagatcatgtgtgctatcacacctggcaaatgcacttaatttggtactgtgatctctacctgagcataaaggccctctgtcgattataacagagatctagtggattccttaggatccactatgtaccaaatcataccatccgcaaataccaacggctcacttcttcctggctagtctacatgccttccatctgattgccttgccttatacagaattagccaaacagagtggtcggatgttggatagaagtggcaggagcaggtgtcacggctttttctgggagcactgaagggaagcattgtatcttccctcctgaatatgaggctgggtatatgtttttatagagattcctcatcagattgaaagattaatctgttgagtgcttttatttttattttttttaaggtgttagacttggtggtttcagcttttagcttttcagggcattctgctgttgtttgttccgttctgttttggtttatactggatcaaacacaggactagagggaaaactctacaaactgatctaagaaccaggcagttcttagggaatagctctgctcatccgagaagcctgtctctgtctccttccatttgctttcccagaatcctgttctctggtgtggctcctcctggcccagctttctacactgcttgcctgtgagacacacacataggtcatcctctggcccaagtgttccgagggagccctgtctctgcctctcctctcctcaccaagctggcgcagcaggacagcagagcgagctccacccacacagtgcaagctccacccacaccttctcttttctcaccccggcctccaggaactgctgcactatttaatcggcacgctgcttctcctcatcgcctccatagtgatagcctccaagagttacaaccagagtggcctggtagccggagcggtaagatgtttttagcgaccagttcggatttcagatggccctgtcttcctgagggaagccagggaaggggttgatttgggagcctctcttcttagaactcatacctacctcaatccagccagttactcatgttagagagtcctggaaagcagacttaagggctattgacaaacctaaacagctatggtagtccggacctgtatcccttatagccagtgcttaaatctgggtgaaagagtctccatccccgtgcctcctctgagtacctactcatggctggcttcccactgcagagaagaaatggggatctcttttgcttctagagatcaaccagtgatgtctaccatgagtccttttcttttctttgggggtcttactgggtagcctagggtggcctagaatgtactacatagcccaggctggccttacacttatagaaaaccccgtgcatctgcctcctcttgagtgtttggcttgtaggaatgcaccgctctgctcaagttcctttaaaaaaaaaaaaaaaagacagaactttatgtagcctaggctgacctcaagttctttatgtagctgaagataaccttgaacttctgttcctccagcctctacctccccgtcctggcacaataggtgtgctccatccgtgctcagtttaatgcagtggagaactgattccacggtgggcaggccctctaccaactgagcttcacccaggctccatttttagttttaacagcgttcagacccagacagggcacctgtaaccctttcagaggtaaaaatgatcccagtgtcccaccagtaaccatgtacagctagctagcaggtgggtatccatgcatacattccaagtatgcatacacaggtacatatgtggtcacgtcgttgaaacattattaaaaggtctgtagagtcttgtgacttatgatttatgcccctggaactcccctcagacagactctctgttctgattatgattttagtaacttcatatctgagtggccgttagtccattactgttttgctacagacacgcaggccagaagtttttttgtgtttgttttaaggcctggtgtcttgtggttcgggctggcctccaacttgcgattcccctgactgcagctcgccagtgctaggatctcaggcgcacagcaccacatctggtttgtgaggtgctggggatagaacctaggacatggtggtgcatgccaagcaagcattctaccccctgagctaagacttttaaaattcgtttcaaggactgtgtcagtttcacttacaaatgtcaccagaattctccaaaccgtggcctgtcaggggtttgcccctggaatttccctcagacagactgactgctctgaagggccacagtgtggggacccagcatcgctgcagaggtgtggccaagcctgtaaacaatgctggcccagtgcaccttccacagtggccctcgtgctccatgcgacctctgaggagacaggtgactgacatctacaggttggcacctgcctgtcaacagtgaatactgagtgatgggaggagggtccaggaatgagcccttcacacacacacacacacacccctctgcccccaacacacactgtgttcagggcacacacaaagagattcccattgggtttcataatcaggtcacacataaactgtgcccaagatcctgagccccagtggctaacatttatcacaccacagggaagccaggaaaataacagaaaaatgaggtccctgttcatgacagggtccatgtgacaattagcaaacaaacaaggcgctgtggtccagactagcattctgtacggatgtaatgataagctgttcaattatgcagtagagacagttggggactgggctgtagtattgtgctaatggtgcagaacagacaatgggagacaaggcctggttctaatcggctaattatgtggctcagacaatctgtataaggagaaccaaggaaaggctatggggtttgggttgctggggacagccgagaacctataaaccaggagctgggcttgaaaagactacccaactttaccggaaatctacccttagtctggctgctcctagatcacacctatccagtgccaatactagcaatctagcagagcatgagtcctgaagcccactgcccagggtcaggccctgtacatggccctgttgtgctggggtcttaagcagaggaggtggcttccggtccctctcctggtttagctgtgaaactggaggggccgggcagggcgggtcaggacagggcacatccttgccttgggggagttgtaaattcaaggagtcaggttcccgaaggcttagaaacctggaaggttatgtaagttactcaaccgacactagactgtgtcacaaggagggtaccgggccaccagtctcatggttcccaatacacgggaggcaagattactctctctcacctgtctctgagaagcctgtcaggtcaaggtcaacgctcttcaagcctgtcactggatggaccctgggaagggaggagcgtagcctcaacttatttttactgtgaccatttaaatacacacagacaaagctgaactccgaggcctcagttcttggctcttacatggctataaagctgacagagaagaacattaccaatgagacccaacaatgctaaccttataatcagtcttttgaatgttacaattcttagacccaaattaaaatttacagtaccaactttcacattcttattcgtcctggatcatcgagacccagtggcttggccccagctatattgtaaatataaacccaagccttggagtcacctaaattgataaggacaatgccagagacccagagacctggctgctgggcctgaccatgcccaccagaggctgcatctctctcaacttcccctctgcaactaggggactaggtggctaggtcacatggctccccggcctccttcctggaacagagaagaaaatcaaagagatggccctgtggctgtgagctcccttttcttcccgctgcagatctttgggttcctggccagcttcctctgcctagcgagcttgtggctgtcctacaagatcacctgtataacccagtcttcaggtaagcttggatcatcagaatgcagggcctgtgaggtggaggccttgtccctggctcagcagcatgggccggagtggagcaagagggcaggggacagaaggaggaagggtgggacctaaggtctgccctcctacccatctctaaatgcccagggaaataccctgggatactctgcgtataaccaagcctgactttggactcttgctccttcccccgctgcctcccacgtgctggaagggtgtgtgtttcaccaacacctgactgtgattggtacagggaacctaagtgcatgcttgcatggaatctctgttgaataaacaaaagcatactcagtgcgtggtggggggcaatgagttgaagccacaggaaaagataaaagagttgagacaatctggcctgcaggcagtttatcagcgagggagggtgnnnnnnnnnnnnnnnnnnnncatttcttgaaataagcttcctgtgacaataataaaactcagaactcttacaaaaacgcaggcagtttttgtggttttgctttttttcttaagcaaggtctcatgatgagggctggagtaagtttgaagctgcagacttcccgctgcaggcgcctgaggtttacccatttggcagcaagtccagcactcagaactgtgctggggtcttcttcccaggacttcctctccggaaaagaaaacaaaacatgcaaataggcttacataaagaaacccggggttttgggtgtggggggggcggggcgggggatgtctggagagatggctcagtggttaagagcactgactgctcttccagaggtcctgagttcaattcccggcaaccacatggtggctcataaccatctgtaatgggatctgatgccctcttctggtgtgtctgaagacagtgacagtgtgctcatatattgaataaacctttttttttttaattaaaaaagaaaagaaaaccagggaagggtatggtggcacacacctctaatcccagcacgtgggaagcaaagcagaggcaggtggatctccgtgagtttgaggctagcctggtctacatagcaggctacaaggtgaaaccatgcctcaaaacacagacccatacctgcctttttctccctccaatgtctaatgtgtcagacgttatctttctcttatttttcaggggtgggatcctactcagttttagagttttggctctgctgagtgttttgttactaaatgtttctctattgaatgctcgcacattataattatcgttaaccctgatacacatccttgaagctttttacccttaaattttcttgaggggaggggtgggggctagccagtgtctacctgtgtagcccagactgcctttgagtttgtggcagttcttttgcctcagcttctcaaaattctaggtttacacgtgtgcaccaccacaatgatgcatgcatgctgtgttcattaaaatctgtaaaaacacgaggtttgtggtgcatgcttgtgatctcaactgtgggaggctgaagtgggcagaccctcaggtcaaggcaatcattttacaatcctatcaaacaaaaccacacacacacacacacacacacccacacacaatttggagcccatggcttctgagtgggttctattcccagaaagataacctaactctccatttctctcccaagatgcatctgcctgatgaggccacagcctctggaggaccctcgccatggctgtggactcttcaggcgacaaggcctgtgccttccctgctttgccaggatactgggctcctgggcatctacagcctcctttcacagtctgctgcagaggacatccctccgttctgggctgttagcaccactcaggtaccaaggactgctctgagcacagtagagagacttgtggatctgcctgcatagacacgcctttcttcataccctcaggaccgagaccacacagaggccgaagaccctaatttatctggcctgtcaatctggtcttgaagcgtctctaagtgaagagccagaagaaacactatgtggccatcctgtctcctgcccctatctctgcctttgtcactgtgggtgggggtgggggtggggaggtgcatagtttttaataaaatgtcaattgcagcaggtttccttattgcatgagatgtctctaacactaggcctttctatgccagcttgagtgtggactccttgctaaatgcccatcctcctagactggcttcaaactaaattatgtagctgaggttgacctagaactcctgatcctcttgcctctacctcccaagcactaagattagaagtgtgtgctaggacacccagttttgtgtggtgctggggatgaatttcctccatacatattaggcaaccaccctactaagctgacatcccatcccccagtcacacacacacacacacacacacacacacacacacacacacatacacacacacaagcttcccatcttacatagttttgggttggccttgaacttgcttttttgtttgtttgtttgtttgtttgtttgtttttcgagacagggtttctctctgtagccctggctgtcctggaactcactttgtagaccaggctggcctcgaactcagaaatccacctgcctctgcctcccaagtgttgggattaaaggcatgtgccaccatgcccggcccttgaacttgctttgtaggcaaaagtgacctctgaactcctgatccttcaacctccatgtccctccctgggatcctagctgtgtcaccatatccagctctgatttttatatcctgggccttaaattcccttccagttaggacgtgggatctggggtgattttcaggcgcacactgggaggccagcctggtctacagagtgagtcctaggacagccatggctacacaaagaaaccctagaaggggcaggggttggggtggggagagagagagagagagagagagagagagagagagagagagagagagagagagagagagagaagtgttagattctcaaagcaatgggaggcattcattgcacgtggcagggaagctgaggtgaaacagtagtggcaaagtagagtcagtggccagcagcccccgggttgagaagagggggccataattgggccgcctctcctccactgtagccagcacagtccctgggcctgactaggtcctggtcgatggcaagctctgctacaagtgtgagttctgtggggctccgagaggttctggaaaccggctggcttcgaggccctagggaagccaccaagcttggacatactactagtgtggcctgcaagacccaagaaggaagccagaaggacaagagagtgatgtgttgctggtacctgactccaaggttggccgtctcctgagcctggacaggacagcagagttcactagcttccctcatcagtgttgaccaaaggtgggaagcagacccaaaatctgcttgttccaggggtccaaagtgtctgctaacacaagggacaaacttctacacatttagggtcttcaggcccctgtgcaacaccaccacctccctcttttggatgtggctaactcgtgtcctattaacctaaggaggaattgtgggactacagacatgcagtgcatgtatgaagtatgtgttaacagggccatacacaggaagtgcatgtatgaagtatgtgttagccaggagagacagatcatgtttactgatcctgcaggagacttggctccattgccagtacacacatggtggctcacaaccaactgtaactcatttcttccagggactccaatgccctcctctggtctcagcagacactgcatgaatttacaggctgcaggaaaaacactcgcacatgtaaaatgattaagtctcaatgagagagaagtgtgatattatcaccttacagtcacacagaccagctagccaccagtggcaaatagcaatggtgcaaccctcgctgtgggcatctctccctgtccaggctgtgagggctgctgactccgtgtggcctccctgtaccacagtgagacctgtctgttgaaaccttgcctgcagaggaacaggagagaacagggctgcagccacctctctgcacaagagcctaggctcttgctctctctctctctctctagtaagacatggagtctctatagcccaggctggccttgaagtccatacatacccaaggatgcccttaaacccctgatcttcctgcctccctgttccagatgctgggattataagtataaaccacagacccctctgtgtttatcaaccagccttacaataagtaaatgtcatttgtgttattagttgtggatatttgccgattccctgttctatagaatagactttcaagaatgaactgaattgaagagatttttcccttttttttaaagatttatttatttattttatgtatatgagtatgctgtagctgtcttcagacacaccagaagagggcatcagatctatattgcagatggttgtgagctactttgtggttgctgggaattgaactcaagacctctggaagagcagtcagtgctcttaactgctacaccatctctccagcctgaaaagatttttttttttttgctattaaaaaataaatttaattcacttaatagagtgctcatccagcatgcaaaacatgccctcagtgaagaagcctgtggtggtccgttcataataacaaggcagaagtggagacaggaggatcggaattcaaccaagggcaggccaggatagaccaacctttactaaaaacaaaaaggtaagtgttgtgtaactcctgcattctggaggctgaggcaggaagatgctaagtctgaagctagcatagctacacgtagggagaccttgtctcaaaaaaaataaaataaataaaaaagtaaaaatgtaaaaatcattttaaggtatcttttgttgttttggttttggtctttttgaaacagggtttctctgtagccttggctgttttgaaactagctctgtagaccaggctagccttaaattctgtgatccacttgcctctgcctcccaagtgctgggattaaacaaaacaaacaagcaaaaaacccaaaaatttaagccaccacgatcccaaaaaagtgagttccagaactaacacagagagactatatatatatatatatacatatatacatatacacatatgtatatatatgtgtatatatatatattaataatagttgaacatttttttaaaagtttgtaagaaaccggtatgaaagatgcttctaaccttacaatggcctgggtgaccagctccaagaggcttcccctcagaaaatactcactacctcctgggaaggtgaggacagtcagtaggttcctaagattttactgtcttcttatgtatctagaaaaactgcaaaaataaaaaatatcctcatgcgcgcgcacacacacacacacacacacacacacacacacaaccgattggctaccacctgaggatgatcgctgtccggatcagtcagggttctctaaactgcggcagatcctgccttctgggcgcttcgcttcggaggtggcagctggcccagggctgccagctgctcactgatgccagctgccccagtgacccagaaaattggaaatctgggccttctagctaagcatctcccaatctggaaacgttgccaacgaaacctagaaacgaagctgaaaccaaacaagccctgtctgggggcacacccggccggctcgcccactggcaagtgaccccgcgcgtgtcctggcggtaaagcggggaagtcctgctgaggcccgcagggctgccagctgtttcctctgcggcctcgccaggcggaagcctccctcccctgccgcagttgtgcatgcctgcagcagcctctcctcccaaccgcgctctacttcctagttgcagaaactccacccttaggtggaggccaccgacttgcgcccactcgtgcagcgcgcgccccctggcgaccagaggaacgcactgccactcctgcccggccagagcagaggctgaggttctgacgtagagcagagatgtgcacacttctgtggacgcacagattagtcatagtcttccattcagggcacacaataaccactggcccacgcctggccgtccccttcctaccttcagattagctttccccttaatttctcgagagagatagctctctctcaagcacgcgcacacacacaggatttattagagtggcttgcaggggacacaggcttgcccagatactttggttctcgtagattgcagatgtggccgagttgacaaccaagattagccatcacatgatgcttatcgtctcttgcgcccatctttctctttccaccatcacttccggaaccaccgatcaccacacagttgcttttcttatgttagttctactctagagcacatgagttcatatgtcagcaggggacatccccgtgtagccttggtggctttatttgcctgtcaccctactggcctcaagccacaccttctctcccacatccttaatttattttaaagatagggtctcagtggagataaaggcacagtcctttaatcccaacactcgggagtcgggagacagaggaaggtggatctctgtgagtgcaaggccagcttggtctacaaagtgagttccaggacagccaggaatatagggtcaaactctgtctcaaaaaagaaaaaaaatagggtcttactctgtacctatgtaccccaggctgccctggaactcataatgatcctcctgtctcagcctctcagtctgggattataagtgtacaccactgtgttgggcatctccttatttttaaaacatttattatttttattttatgtgtttgagtgttttgcttgcatgcatgtgtgcaaacatgcacacatggtacctacagaggccaggttagggtgtcaactcccctagagctgaagtgacagatagttgtgagccaccacgtaggttatataacatgtctgttattccaacactgggaggtggaagcagaaagatcagaagttccctgctgagagaggcgggaggaagaacaacaaaaaatacaaatacaaaatgttgaggactgtataaacattttattttatacacgagtgctctatctgcatgtacacctgcatgccagaagagggcatcagatcccattatagatgattgtgagccaccttgtgtggttgctgggaattgaactcaggacctctggaagagtagacaatgctcctaaccattgagccatctctccagccccccacaaaaatttgtttaaagggctggtgaatatgttcagcaaaaaaaaggcatttgctgagttggatcctgggtctccctcatggtggacaaagagccctgcctcccacaagtctgacttctaacaggcactgtaacatgcacatacacagacatataggaacattaaaaataagttggggtgccgggcggtggtggcgcacgcctttaatcccagcacttgggaggcagaggcaggcagatttctgagttcgaagccagcctggtctacaaagtgaattccaggacagccagggctatacagggaaaccctgtctcgaaaataaataaataaataagtaaataagtaaataaataaataaataaataaataagttggggtaatgagaatccttgctgccttttacagctgcctttattttaaaaagtttctgtgatgcatattacttatagaactataatttagcctaaaaaaaaaaaaagacatctcagagcggtcaagactacaattgtgtgttcacacacgttcatgtgtgcagtacacatgtgtgaacatgcataagcacatgggtgtgtagaccagaagaaaccagagtttcctgggagccagatctcatcagcctggagctcaccaggcaggccacactggctggtcaaaaaccccaggcagccacctatctctgcctccccattgcaacatatgcaaccacacctggctctaggtaggttctggggttcaaactcaagtctttgcaactttgcaagcattgtctggaccatttcccagaccataataagtgctttataaactgggggctggttgggctttttggtttgggcagttcaaggcagtttctctgtatagccctggctttgctgtctaagccaggctggccttgaactcacagagatccacctgcctctgcctcccaaatactgggatcaatggtgtctgccaccattgcctggtgtaatcagtgcatccaacattgtcttcagtctcacatgatgatcccgttcctctgttagcaaaaccaactttgataggtagagggcagctttaaatccaggtattttcatactggtgtgtgcgtgtgtggcgtggggacgggggtctagattatgttactctagtcacagtgcattaatcacagtcagcaagcgcaaccttgaactcacctgcaaaatgagtcaaacccactaagggctcatggggaactctggagaatcaacaacccttcctcacctctggacagtcctgtgactgtaaagtctcaactctgtggacagaagtctcagcagaaaatgggtgggcattagcgatccccctgccccagcctcacaggccgcccgccaccaggaatgctttactgtcggcattccctgctttaggtcttctgctctttgcagctggctgcatattgatacaatgttttttatcaacaaaaaacaaacaaacaaaaaacctgaagaatgtacaaatcccagtgaatttctgaggactaactataaagatcctgttattctctagggactggaggcaggaattttacaaactccacaaatagttctgctttagcacaacgacgccctggctctgcttcgcactgtccagtgattgagctgtcccaaacagatgcctctatctgtccacagcacaggagccacatctagggtgttaagcagagtccaaaacttcattcttacaatgatttaggtggaggtgacatgcagctgtgaccccagaatctgggaagcaagtacagatggacctggaggtcagtgtcatcctcatcgacagagtgagtttggagccagcctgggctacatgagaccctgtgtcagaacagaagggaaaggagagagaggcgaaaggaagaggaaagaaaagggggggagggatttaaaaccacccgatgtctagtattcttctataattcatgccatgggattccctaaaaagtatatttttgttttcatttatttatttggctgacctggaactcactctgtagcccaggctggccttaaacttacacagatctgcctccaccacagctagctcttacagtattttccctgctatgtaaaccaggttggctttaagctggtgaccttcctgcttcagccctaagtgatggcattggagactcctgtgctgccacagccgacaaacatgatgtttaagtccgaatcccactctccagaagacagcccgtgtattggacacgtacagacatggggacagctaacccctcaagtgagggcctcatctaaataagtctgtaattaatgaacaactgtgaaggcacaaacactggaattaagaggatttattttaaaagattataaaagttgatattaagagtgattaaaaaaaagacccacaggctttaaatcaacaaatacaaaagtgatcagatataagcaacgtagaaatacacttctcagtccccacatagagcataatttaagtatagtaattataaaagtcttgtgcaataagtatatttcccttcttagtcttaaaaaccattctaaacaatttgtataaattacagcaactcaagtctgccacagctactaaaaaagacattgtcctttctgtgctgacagtctctggtcccagctcttctggagggtgtgtgttgccacagtctttaaccccatctccctccatagaatgcaaaagccaaccagtcacaggttccctcaaaagagaaaattctaagagtggccacagacacaagtgaccaaattatcttcctaaccggaaagcctgaagtagccgaggcagagccctcagctgtgagacaactaacacacagcaagcagctggatgctgatgctgagccgctgctgtgcagagccaggcagagtgtctgccaatcatgaacaagccaaacacaggtagagaggcacctactactgagatgcaatgtccccaagggcctgagagttagaaactagttctccaggaaggcactattgaggtcagaaacctttagaggcggggcctagtgaggtcttaggtcagagagggtgtgcccttaagtgacctcaggacctcaagccaccgcccttctttccttgcttccagatctacaacaaactccccaagtgatgtgttgctgtctaaaacagcaggtctgactaagggccaaagcctacaaaactgcaagccaagattaaccttttccccaacccttcctctttttaagttgattgtctcaggtattttgttatagaaacagtcagcagactaatagttggtaacactaaagtagctcagatttgctgttaattctcaataggtctaaatgatatttacagcacagcttgatataaaactctaaaattgtctgcaatagactggttacttttgaacttctctattcttggtttcaagagcctactgtcccctctctggaatggcatgtccagtaaggcaatgttaaggatcagtttcatgatctccagagcagctatggtgacatcaccagtatgtaaaccttgaggccagcagatcaggcagtgaggcagggacagggcagaagctgtgtgcccagattcatccacttccaagaactgccacagcctcactaggaaactgaaaccatctccttccacacaccaggcacgcaagacactggaaaggacggggactttacagtgaatccccggaaacacgatccatcgcaccactccaaagagaaagcccagcctgggaaaccttggccagtgcacagaaggcctggacgtgctggatctcgctcaagctctaggaagaaggcaagaagggaagaagggtcccccgggtcggaagggcgcccagtggttctaagacagccctccagcagcaagcgatccttccagagtcccaggaggcctgcggcctccccacaccaccagcagtactcactagcagggcttcaggggtttacatcttcaagacctctcccctggagagaaagaaacccaagcagaggcctgtgggagggaacacggacctgacacctctgcctcagactcctggtgagaagggacacacctctggatggcctggagacggctgacaatgggaagagaacagagaggaagagcgagcactggccttcacagacggcacacggcagggcacgggaccattctagagaaagtcaggaaggagaatctggcgggccagagatcccagcctaggctctgcagagaagcctgcggagctgtgctcgcttgagcagaaaccatctgcccggagggagacccacaagtctctagtttgacgccatcaaccctgtttgcacgggtgaacacagcaccgaccctcacatctctgccgagttgcaaaggcctagccatgtgattacacccgcggtgcgggacagtctcttctctctttggtctttagatagactatcagctccctcactttccagtgttacataacttcattttcttctaaacttaatctcagcaatcacagtgcaatgtaaaagcctccacaaggctgctacacggttgctttcacacacataaacagcaccagcccacacgctttctgttaggcaatgcatggctcagaaggaattaagaataattgctttaagaggttagcacattaagtgtaaggctgagtaagatacagtaaaggatcataacattaaggaaagacgcctacaccagcatcttaaacactcattaaatctccggcaacaacagaagttaaccggttcctgaaaggacggaaaaggcacagtctggaaggtaagcgtggtgaggggcgtcctatagcaaaatgacagacatgcaattcaaaggacagcagtcctcatctctaaaaacaaaacaaaacaaacaaacaaaa

SEQ ID NO: 3410 - DNA, 609 bp, Mus musculus
ggaggcggccagcccgggctgggtcgcgcgatgtctcatggatcggggctcgtccggaccacgtgcagcagcggcggcgcgctggggccaggccagccctcggagggactgctggaccgggtgtacccgctcacccacggcgccctgttcaaagtggcgcagatggtcaccctgctgattgccttcatctgtgtacgaagctccgttccgatcgactatggtgcccacagcttcttcgaagtcgtcaccatgtgcgacctgataatgatcctcatcttttacctggtgcacctcttccgcttctaccgtgtgctcacctgcatcagctggcccctgtcgatctttgggttcctggccagcttcctctgcctagcgagcttgtggctgtcctacaagatcacctgtataacccagtcttcagatgcatctgcctgatgaggccacagcctctggaggaccctcgccatggctgtggactcttcaggcgacaaggcctgtgccttccctgctttgccaggatactgggctcctgggcatctacagcctcctttcacagtctgctgcagaggacatccctccgttctgggctgttagcaccactcaggtacc

SEQ ID NO: 3411 - protein, 134 aa, Mus musculus
MSHGSGLVRTTCSSGGALGPGQPSEGLLDRVYPLTHGALFKVAQMVTLLIAFICVRSSVPIDYGAHSFFEVVTMCDLIMILIFYLVHLFRFYRVLTCISWPLSIFGFLASFLCLASLWLSYKITCITQSSDASA

SEQ ID NO: 3412 - DNA, 1405 bp, Mus musculus
tgggggaggaaggtcctgaggcgatggacctgtttttattgctgtaggtgatggtggcacaggtgcgtgccccgtgcacacacacagaagcagaaatgaacagcgcagcacggtatgctcagggcatttccccctactcgtgtcagtacctagtagcagccgcacccacacaaaaaatccctggaggctcatcaccagctgtgacctgggcggtgcgctcctgggagaggccagggccccaggcgtccggtttcctgcccacgccagtccaacttccgcgtgtctagagggcaggggcttgcggggcatctgctcccgagtcctctccgggtccggccgcagctgggaagagggagccgtgcgccccgcccctgaggctccgccccgtcccgtcccagcttcaccggccagaggtccccgggcctcggaggcggccagcccgggctgggtcgcgcgatgtctcatggatcggggctcgtccggaccacgtgcagcagcggcggcgcgctggggccaggccagccctcggagggactgctggaccgggtgtacccgctcacccacggcgccctgttcaaagtggcgcagatggtcaccctgctgattgccttcatctgtgtacgaagctccgttccgatcgactatggtgcccacagcttcttcgaagtcgtcaccatgtgcgacctgataatgatcctcatcttttacctggtgcacctcttccgcttctaccgtgtgctcacctgcatcagctggcccctgtcggaactgctgcactatttaatcggcacgctgcttctcctcatcgcctccatagtgatagcctccaagagttacaaccagagtggcctggtagccggagcgatctttgggttcctggccagcttcctctgcctagcgagcttgtggctgtcctacaagatcacctgtataacccagtcttcagatgcatctgcctgatgaggccacagcctctggaggaccctcgccatggctgtggactcttcaggcgacaaggcctgtgccttccctgctttgccaggatactgggctcctgggcatctacagcctcctttcacagtctgctgcagaggacatccctccgttctgggctgttagcaccactcaggtaccaaggactgctctgagcacagtagagagacttgtggatctgcctgcatagacacgcctttcttcataccctcaggaccgagaccacacagaggccgaagaccctaatttatctggcctgtcaatctggtcttgaagcgtctctaagtgaagagccagaagaaacactatgtggccatcctgtctcctgcccctatctctgcctttgtcactgtgggtgggggtgggggtggggaggtgcatagtttttaataaaatgtcaattgcagcaggt

SEQ ID NO: 3413 - protein, 167 aa, Mus musculus
MSHGSGLVRTTCSSGGALGPGQPSEGLLDRVYPLTHGALFKVAQMVTLLIAFICVRSSVPIDYGAHSFFEVVTMCDLIMILIFYLVHLFRFYRVLTCISWPLSELLHYLIGTLLLLIASIVIASKSYNQSGLVAGAIFGFLASFLCLASLWLSYKITCITQSSDASA

SEQ ID NO: 3414 - DNA, 111044 bp, Homo sapiens
ctaaagcttcactgcctgatccatcaaatgtcaccattccctcactggccaatgtcaaaccttctctttttgtcaatcatgttgaagcacacaaacatcagtgctggttgacagtcaactttatggtggtttttctagagatacattgtggggagatggggtaatgcagggaccacctgtgcaattcagcaccaaattatctcttgccggctggaactaagtacaagtggccacagccaggaaataattgttagcaaattttattgtccacccgcaactgtgcacagagctctgttttgggaacctgacgggatatcggacaatgcacgtaagctgggcgagggcgacgcaaaagagggtgggactaagccaagggcaacccagaggggtgttttgttttggtttgttttgttttgctagattcttgctcaaagtgctgtttgcacttgtctgccaatgctcccaacatgccaagcccaaccactttcatcccagcctatttcagaggccactaacaggaaccaaatacctgaataagtataatttcatttagtccttagcccaatgaggtaagctatgtgaaccccattttgcagatgtggagactgatgtgcagaatggctctgaggcccctaaattccaatccaggtcttctaaatctgaatccagtgctctttccactttttttcttgaattcccagatgtttcctctaatgtattccccccctcttttttttttttttttttttttttttgaggtagagtcttgctctgtcacctaagctggagtgcagtggcgcgatctcggctcactgcaacctccgcctcccgggttcaagcaattctcctgtctcagcctcccgagtacctgagattacaggtgcacaccaccacgcccagctaattttttattgttagtagaggtggggtttcgccatgttggccaggctggtctcgaactcctgacctcaggtgattcacctgcctgggcctcccaaagtgctgggactacaggcataagccaccacacccagcctgttccccacttttaagtagacggttattctgcttgctcaacagataatgcagactgagctttcatgtttagagtaagaatttaatagaagagtgaagttgatcttccctgtttaatgacagtcacaattatttgtgggctgcatagcaattaagcataacgaagtagtaaacaggtctccccctgtctaatttaaaaattataaagctccactactgcataccaggcattgtgattggtgctgaggatgtcaggatgaaggccaagaagagcctgcacactttagaagacttagtatgtgccaggcactgtgctgaggactttccatgccttaatttattgaatcctcacagaaggctttacagattgtattttccaaagatgatcacaacaatatcatcatgcaccttcctaatccagtggtggagtttatttcagcatccccttcaatgtgggcaggccctgactagtagcatacagagggagtaaagatgttcagttccaggcgtagtccttatctgtcttggcagcttcttcttgcttcctggaatacctattctgcaatgcttcctctcagaacccagctatcatgttctgagaagcccaagccgtgtggagaggctgtatgtgggcattccagtgacagccctcactgagctcccagccaactgccagcatcagctgtcagccatgtgagagccatcttggatgtccaacccagctgagccttcagatgactgtatccccagctgcattctgactacaacagcatgagactccaaatgagaaccaaccagctgagcccagtcaaatcacagagccatgagagataacaatagattattttaagccacaaacctttgggttgctttgatatgcagcagaaaataattggattagcaaacattggtatgagttttcattcccattgggacagatgggaaaggttgacccatctgtcccatctgggtttagaaatttcccagcttcacagagctggtaggtggcagatttaggatttaaacccaaggcagcatgaccctgactgccgagtttccacacatgacttctttctatgagctcccagtctcaaaagagtcaactaaagtgagatatgtcacacacttccagtgtgggcaaagggctgggtgcacatacaggagtcaggtaactcacccacatttgccatattgtcttgccacctatctagcctcatgtagcatctcccacttctttggacctcatgcttaagcctgcatgaacttcatcccctctaatctgtcatgcccgagtacttacctggaactctcttctccacccacccaaggctggttaacacctctttatccttcagtatgcagctaagatggcccctcctccaggaagccttccctgacttccccatcacatccctgacagggtaaggtatctccccatgggctcccatagtaccccacttttattctatcattagcatttttcatacatattgcctgttttctcagtctgggcaaagaacatgtactcctgtgcctgacacaggtcctggcactttgtcagtgctcaataaatattgccatggggattgctcatcactcacagaaggcttctcagaggccgtaacattttggctggactttgtgagactggcgggcatttgccaggttagcagttttcaaccagggtcatatacgcatcgaaatcacccgcgcaactcttcccaaacatggatgtccagccccgcctgagcacactgaatcagaatctccaaggctgagcctgggcaggtatagttttcataggtttcacaggtgattgcaaatgacagcatgggctaaggaaagataaaaaagagatctcattatcatcatcatactcatcatcttactgtcagcaacagttctcagcatttgacatatcttaacccctttgatcctcacagtgttcattgtctacataaagcacaaatcctaaggtgggcatccacagtcctgtggtatctctccagccaaggtccccagcccttttccccaagtccccacactccagccacgccaaaggactgggaattcctggaatccgtggtgcggtttcatgcctcctttcttgacatatgtcattccctcttttgcccaccccataaatttttaatcgcccttcaagacctagttccaagcacatattcttttttgaaactttctcctcccagttcaagacaagctggttactcccagctttgggccatcccttacagggatgctacagctctgcattaatcccacaaatataaactgagtactactttgggccaggcactctgctaaatactggacacaaacagggagccgtctaacccagacctcgactcctcccaacagagatgacagagatgacgaccacagcctcctcggttatctgactctatttccctgtgttgctatggttacaaactccctgggggagggagttcctcttctgggaagtgttcagtcaggcatgtggaaggctctccgtaacatttgctgagtgagggttgtgagcaaataacaaggtgaatcctcctctcctcccttcctctctcagtaaaacttttccccagcagctctcaaaattccttggattacctaaatccaagaaatcttttatttcacccttgaagatggtctttgatgcttatggttatggaaatggcaacgtacaggagtccctcagccctcagataatgaagcctcattgttcgatacataaggacttaggaaaaatgataaaataggtaacatttactactatgagccagatgctactctagaccgtttccatatgtcttatcccatttagatctcgcagttaccctgaggggtcatttctattgttgttcctctttacagagaaggaaatggaggctgagagaggcttgcccaaggttgcacatctagcaagtgatggaactaagggccaaacccaggcagtttggttccagagtcctgcctctcagccacacagccaggcagcacaaagacaaaggtttcagggtcccacctggcgctaaagaccaggtatcctggctggccccgctgtggtgagtacatgccgctctccctctgctgggcctcagccactctcttctgctctgcctctccttatttcctctcatggcccaaccagcctcctggcttccaccttctctctatgtcccaattgctaaacccctctcaatgcctcacattcaaactccgcaggacagaggatcatcagtggagctcccactcttactaggcaaagttcccttataaggccactccaaacactactggccaacccactgatgggctgcccttggctcaggagccagcctgatgcaataaatttccaatggatataaggcagctgattggtgattctcagaaggacctgagagtttgactggtttacggaacctaataaactttttaaaaattcactggaggccaggcgcggtggctcacacctgtaatcccagcactttgggaggccgaggcggacggatcacaaggtcaggagattgagaccatcctggctaacacggtgaaaccccgtctctactaaaaattcaaaaaattagctgggcatggtgtcgggtgcctgtagtcccagctactcaggaggctgaggcaggagaatggcatgaacccaggaggcggagcttgcagtgaggcgagatcgcgccactgcactccagcttgggcgacagagtgagactccatctcaaaaataaataaataaataaataaataaataaataaacaaacaaataaagaaattcactggaaaaggattttaaaggctgatattggaagagtttcatggacacctgatgcctttgtctgcctggcatagctcagacttcctaacaaaatgccatggccaggtggcttaaacaccagaaatttattttctcagagttctagagtctggggagtacaagatcaaggtgctgatcgatttggttcctgttgagggctctcttcctagcttgcagaaagctaccttctcgttgtattctcacatggtggagagaatgccagcaggttctctggtgtcttttttataaggacaccaatccccccctgagggccccaccctcatgatctcacctaagtctaactattgcccacaggccccatctccaaatgtcatcacattgggcgttaagtcttcaacttttaaatgatggggggacacaaacattcagtgcataacactgcctaatattcactccgctttctgatactcgcaccctggttttccttttgggaaccaccccttcctcactcagctcctgtggttctactgggctgaacctatcccacccccagcttcatgggtaggtagaacttgacctggccaccaaaaatgttccactcctctggccatagtaattcgttgaaagatggaaccatgacccatatttggactaatgagagatagtgcctattatggactgaattgtgtgtcctccctgccccaaatacataggtggcagccttacccccaagtgtgactgtatttggagatggactctttggggagataatatggttaaatgaggtcataagagtggggccagaatccaataggactggtgtccctttaggaagagacaccagagatctctctctctctttccatgtacacagagaaaaggccatgtgtggacacagcaagaaggtggccatctaaagtcatgaagagaggcctcaccagaaaccagccctgatggcaactggattttgaacttctagtctccagaattgtgagaagtgaattcttgttgagaagccacccagtatgtgatattttgttatggcagcctaagacagtaccagagccactggaaaagacaggctgaaataacgaaggcaggattattgtgtaagcctgagctgtcagagctcatgagagggcctgcctgaaaagccaacacagagcagagtgaagccaggagatggaggtcctgactgtgcctgaggagcacctggatccagccatgcctgaagtgggtgtatacctctgcatatcacagttactcaagccaatgaattattttgttttgctttttattagtttgtttgtttgtttttgagacaaggtctcactctgttgcccaggctggagtgtagtggcacgattatggctcactgtaacattgaactcttgggctcaagtgatcttccccccgctcagcttcttaagttgcttggactacacatctggccaattttttcattttttgtagagatgggggtctcactatgctgcccaggctggtcacaaaatcctggcctcaaatgatcctcctgcctcggccttccaaaatattgggattataggcatgagccaccgtgccaagcctattttgttttttgttttgttttgtttttaaagacagggtcttgctatgttgcccaggctggcctggaacttcagggctcaagaaatcttcctaccccagtctcctgagtagctgggactacaggcatgcaccactgctcccagcttgaatgaactcttctttttgcttgattttagtttgtctcatcaaaagcactgtgactaatacagagtcaactctaattttattacttttttcattatatctgatcagatataacatcataaacacactggtgaagaagagttatagtcagagtaccactcgaattgaagctttaaactgtcaataagccacctgcaatccctcggtgtagagaaaaggagaacttggacatcttgatttctcaccaggtattcagaggtcacctacctggttggttccctcttagagtgtgacatctttaaagtgggctatgaagccctttgcctaagaccttgctttcccaaggggcagctattcacatctagcagacaacacactagtgtagacatctcagtgcacttggcaagcctctgaagcctcttcttgtaagtcaggccagcaatggcccttgcactggcaagcatcttgctcaagctcttaagtgatcataataaagtgattaacacagagtgcccagcacagtgattacttctgattagaggtgggtggtgcattagtcaacaccaggcagaaaagcccagcaatgtttctgagcagactcaggaagagatagttgttctcaaacttgagtatgcatcagaatcacagaatgatggtgaaggggggtggggagtgagggtggggttgggaagacttgttaagacacacactgctgagccctacccctagagtttctgattcagcaggtcagagtgggcccctagaatctgcatttctcacaagttcgcaggtactgctggttggggggctatacactgaaaatcactgttagaagactgctgaattggacaaaggcccctcaaaggagaaatgatccagcacttggtttttctgcttccctgaaaccctcatctcaacaaagatgccctgttatctccactgtgggtcctgaagccttagacaagtacagaagtgaaatgtacatctacataaaaaaatgatacacagtactaacttcatgcctgtgggtatagagccagaaatgtcacagcacacctgcatatctatcacattgtcacagcagcccctagatgcaattattcctgaattacagagaaacaaatggaggtaccaggcagctgtgactgttgtctacagagaagacacacgtggaaggcaatttttcttggtcatgaaaattgtcaaatgtacataaaggtgaaataaatagtgtaataaatccccaaatgtttcaactgcagtggactctggcaatgacagtggttctcaaatttgagtgtgcatcagaatcacctaagagacttgccaaaacagatattgcatgggtatcatccaccaacaagaattattaggactttgccacatcgaaaactcttctgatgacaagacagcactggcagggaataaactcacaaagatagttttatgtttcactttgctttgttttgttcttgaggcagggtcttgctctgtcacccagcctggagtacagtgttgtaatcatgactcactgcagcttcaacctcccgggctcaagcaatcctcccacctcagcctcctgagtagctgggactacaggcatgtgccaccatgcccagttaatttttgtatttttttgtagagatggggtttctccatgttgcccttgctggtgtcaaacttgggcttgtgagcttgattttgggattacagacatgagccaccgtgcccagccagattttttgatgttatctccaaatgaataaatgtaagtatggccacagggacactgctcaaaaggaacatgataacatacctcgttttggtagtcccgtttgggcctgtcttcatttttatgtttttttccttttctttttctttttctttttttaagagacagtgtctcactctgtcacccagacaagagtgcggtggcaagatcatagctcactgcaatctcggactcctggcctccagggatcttcatgccttgacttcccaaagtgctgggattataggtgtgagccaccacgcctggcctcttcatttttaaaacaacccaaaagggatacagaatagaatgtcacttggatagctgtttgacagctttttctttttcttgtctttttttttttttttaattgagacaaggtcttgctctgtggcccaggctggagtgcaatgccactgtcatggctcactgcagcctcaacctcctgggctccaaggctcctccagactcagcctcctgaacaggcatgtgccactgcacccagctaatttatttatttatttatttttatttttatttttattttgagacagagtctcgctctgtcgcccaggctcgaatgcagtggcgcaagctctgctcactgcaagctccgcctcccgggttcacgccattctcagcatcccgagtagctgtgactgcaggcgcccgccaccacgcccagctaattttttgtatttttagtagagacggggtttcaccgtgttagccagaatggtctcgatctcctgacctcgtgatccgcccgcctcggcctcccaaagtgctggaattacaggcgtgagccaccgcgcccggcccagctaatttatttttattttttgttttttgtagaaatgaggtctggccatgttccccaggctgacagcttctaacagaagcaaacatatgctccccttgtaaccagtgcgttcacttgcagatatttgtcccagagaaatgagagtttgtatccaccaaaaaaacgtgtaccataatagtgactatagccagaaaagagatgagggaggggggaaaggccggaaggagggaaggaggcaggcaagcaggtaggaaggaagcaagcttggtgtccatcaactgggtaaacgtttaaaaaatacggtatctttgcacagtggagtactactcagcaataaaaaggaaggaactgatatgaactacttatattcccaacaggatggatcttctaatttgttatgttgaaggagaatattctgtattacttcaagtttatgaagtccaagaacaggcaaaatgaacctacagtgacagaaagcagaatacactgtagtggttgcctgaggctggataaggatggggccagggaaggaaggtaggtcaggaaggcccaccacggaactttctggggtgatgggcacgttctatttgttgatctgggcgacggttacacaggtgtacacatatataaaaattagtggagctgaacacgtaaggtctgggcatcacactttatgtaagttaaacttcagtaaagtgctctcagcacacatccgcagccgcacccacacaaaatcccaggaggctcagtaccagctgtggtccgggccttgcccacctcggagaggccacgacccaaggcatccggtttcctctcgctccagtctaacttccgcgcatctacgagggccgggactgccgctacctttctggaaggcgccggccggccagtcaccggagggatcccgccagaggcggctccgcgtctccagcagcggggcagggacccgggcgccccgccctcgccagcgcccgcccccgcccgcccccggcccgccctctgtatctggcccctgggcagctgcccggggaggcggccagcgagctggggccgcgcaatgtcgcacggagccgggctcgtccgcaccacgtgcagcagcggcagcgcgctcggacccggggccggcgcggcccagcccagcgcgagccccttggaggggctgctggacctcagctacccccgcacccacgcggccctgctgaaagtggcgcaaatggtaagtgagcgcggggcgcgaggccgaggttctacagggcgtcccgggaaagcaggggtccgggagcggacgcgccgggcgtctggacccggccggagcccagggagcatcgcgcagcgggcggggcaccgcgtcgctaaagttcgcggcaggcttcctccgggaaagttgctgccgcagcccccgcgctggagctcagtccccagagccgccccggcccttgctcccgcggacccaggtcgccagggtcgcaagtttctccggccacccccctgcgaagcctgacccgcctactgactgaaaccacgggcaaagttccttttcgtctttcttcctcttctctgggccgcgccgcttcgaacccgagccgggggtggaagagtcgcccaggcggcggcgctgagggagcgaaacccgacctcttccccgtccacggcctcctctttcctccgaacccagcgcggcagggcttccctgctctgtgtgcagtttcgctcgaaggaggaggtcagagggtcttgcgttccatagtggggaaaaagaactgggaccgttgagacggccgtcctggtcccctgcgccctcaagttccgagggagggcccgggtctcagggggctctggagggcagggggtcagttgggaaaggcctgttgtcaggggctggtactcatgtaggggagccagactgttgaatgggagtcacccgtggagccaggcaggatgagtgtctgggcttggattgtgaccaactcagcacaagggcctcctaccagggcagacgttgcctggccgattctcttgttccccactcttttcttttctcccctcccgtttttttcttctttaaaagtttgtaatctgaaacaacttttccgtttgtatgatgtgttttgaaactgggttgggctgtttgtgagtctccaccattgtaatgtttgcaccaagaacggtggggaggggagcggtaagtttcaaaaagaggtgtggggaaaggagtgtggggctggacaaggtcacacacccagaagctggggcctgctaaggtggcctggccccagggggttgggcacaggacgtctgtgcatctatagcactgccattccagacactgagtgtgcatgaggtggccctcatgtcttgcttgggccagacctaaagagaaggggcgctgagttcctgcctccctaagaacggtgtctagatagaccaaaaactaggaagagccatttcagcaacgtacaaaaaaatctggtgctgagcattgttgggtttgagcagggcattttttggcccaggctaagagatttgatcagccaaatagaagagaccagcccatctcaccatccttaaaagatgggctggggtgagacatatcctacctgagcattggaagggatgagtttggtagacagagaatgggatcagaagcctccatcttggcccctgagtttgctggacaaagatattgtgggatgaaaagtcttcttgttggtctatgagtttggtacacaaacataatggagatgaaacctcggcaacatagcgagaccccatctctacaaaaaaaattttaaaaccttgtgtggttggcatgggcctctagtcccagttacttgggaggctgaggtgagaggattgattgaactgagaaggtcagtgaactgtgccactgcactagtctgcgtgacggagggaggcctgtctcaaaaaaaaaaaaaaaaaaaaggtacaaagaaaaggtaatggagatgagaagccttcatgtggtccatgattttgatgaataaagatactgggagatgagaaatctccatctcatcttaagctcctcagctagcctctggcctgtggtccttgggccaatttgcaagtggcaagagtggggcctgttgttccaaaaaagagaacaaagacttgaataatttctttatctggttgcttattctctatgtgctcctcttaaaaccatgctgaggagtcttacacctgccctggaggattccccatcactgctgcaggcttgtttgatcagaccctctgggagcaaagttgcccttgcaggatggctgtattagtcctagttagggctatctacttgggcctcttatctaactcctccctattttcccacttctcctcttttctaagactctgcttgggcatttgaggttcatttgtcttctttgctggaaaatgcttgtttagccaagttttaacattggggaagggcagaagcagctaaattaatgccacccattggggctttctttctatgggtctctcattttgaccatcagtttctcagtttcatactgaacaggttgacccttttgtcctcagcttctcatgaaatgttttcatcatgatctgatcaatagatctgccaacacgttgtcttaagaaatcattgcaaaggctgttccactggagaatgacttcccttgtcttggcctcttctgggtccaccattactagaaaatgagtttctgagtgaatgtgtgtacttgacatgtcatttatacatgtgtaatttttataatcctctggccatgataattcagtttctttggtcttcctttttggagtagagacacagtcacaggttttgacttttgactttaaagcactcttttttttctttctttcttgagagggagtcttgctctgtcaccaggctggagtgcagtggaacgatctcagctcactgcaacctctgcctcccgagttcaatcaaatctcctgtctcagcctcacgagtagctgggactacaggcacgtgccaccacacccagctaatttttgtatttttagtagagatggggtttcaccatgttggccaggatggtcttgatctcttgacctcatgatccgcccccgcctctgcctcccaaagcgctggtattacaggtgtgagctgccgcgctcggctaaatgacttttttttttttgagcgagacagagagggtcttgctctgtcacccaggctggaggacagtggtgttatcatggcttactgcagccttaacctcctgggctcggcgattgtcccacctcagcctcccgagtagctgggactataggcacccaccacgatgcccagctaaattttgtattttttgatacagacggggttttgctatgttgcccagactggtcttgaacttagagattcaagggatctgtccacctcggcctccccaagtgctgggattacaggtgagccactgcgcctgcatgagactcttttttttaatagctatttttttttagccctattattgttctagtaattacatactatataccatgtgtgtataatctcattaaatgtttctaagaatccagtgaagtaacatgtttgatagataaggaaacgggctaaagagttaaagagacactaaagtcacacagctcttagcagtagtggtggaaccgatccaggcctaatggcctgatctccaaaactcataactctggcagagttgttgcttgttaatagttctagggatataaaagccacagtgagataacacttcacacccacggagatgacaacaatagaaaacaacaagtgatgaagatgtggaggatgtgaagaaattggaactctgatacagtgctgatgagaatgcaaaatggtacagccactttgggaaactgtgcagtttctcaaaagttaccatgtgacccagcaattctactcccagctctacccaagaaaatgaaaacagatgtccacatgaagacttacacattcatatgtgttcataacagcattattcataataaccagaaaatgaaaacaacacagttgcccatcaaatgatgaatgtataaacagcaactaaaactaagtgctacattcatacaattgaatattattcagtcataaaaagggagaatgaagtactgatgcgtgtaaccatatagataaccatgaaaacactaagctgtgaaaaaaagccaaccacaaaagaccacattatatgattccatttatatgaaatgtccagaataggcaaatgcgtagacacaaaaatagattagtggttgcctaggtcagggagcaggggttgaaaggaaatgggacgtgactgctgtaaggggtatggggtttctttagggggtgatgaaaatgttcaaaaaattggtgatggtgccaggtgcggtgggtcatgcctgtaatcccagcactttgggaggctgaggtgggtggatcacctgaggtcaggagttcgagaccagcctggccaatatggtgaagccctgtctctactaaaaaatacaaaaattagctggatgtggtggcaggtgcctgtaatcccagctactggggaagctgaggcaggagaattgcttgaatccaggaggcagaggttgcagtgagctgagattgcgtgactgtactctaacctgggtgacacagcgagactccgtcacaaaaacaacaacaacaacaacaaaattggtgatggtgatgttgcacaactctgtgaatatattaaaaaccaccgagatttatactttaaataagtaactggttggtatgtaattatgtaaatagacctgtggatgagtgtgagggggcaaggtgctctgcatgcagccactgggtgtggggaggctacagctacacttcaggaaatccctgtggtgttcccaccacatccactcctagaagaaggagtgtcccctgcaggagtcacaaaagctgggctgaaaggcatcccctgagtgcctgaagggtctgagctgaaagggatgccctggggtctgaaggggtctagatatccttgctgtgggattaaggagaccccaggatggggcttgtggccctaccaacacgtcctatctatttgttcattcagcagacatttataactgccacattcatctccatttgtgcagaatcagatgactgtgacaaagttcttgccctcaagtaatctgtggttcagcttgtcatgggaagaggggtcttgtcccagaccccaagagacagttcttggatctcgtgcagaaaaaacttcaggtcaagttgtagagtatagtgaagtcaaagtagtttactagacgccactcaattacagagtagagactcttcagaaagcaagaggaggaacgcacccattgcaaatacaatgcttgcttatataggttattaaaaatagtgtactttattacaaaagcttgcgatcagcttgtgacaagctattaatattgttactttcctatgtgattattgattttagcaagaacttatgagtgtaccattattttaaaagcagaacctattcttaaactaagaatactttttcttcttgaagaactgggacatttccgtaagttctgggtctttatttagttagttaatattattaactcgggccgggtgtggtggctcacgcctgtaatcccagcactttgggaggctgaggtgggcggatcacgaggtcaggagatcgagaccatcctggctaacatggtgaaaccccatctctactaaaaatacaaaatattagccaggcgtggtggcacacgcctgtagtcccagctactcgggaggctgaggcaggggaatctcttgaacccgggaggcagaggttgcggtgagccgagatcgcagcattgcactccagcctggcaacaaagtgagactctgtctcaaaaaaaaaaaaaattattaactcattccctcaaccataaacatcatgtgaccaagactgcccaaccccctgggaatgtaatccagcagatttggctttctctcggcctttattcaagatggagtcactctggttaggatgcctctgacaagctgaggggatgaacaagtaccaaaattggctgctcaggaaggtaaacgttctgatagttgcccaccttatggaagaggatcagagggcaaaggtgatatttaaattgcatcttgacagatgagtgtaagttttcaggttgggagtggctcatttacccctttggtgcctttattcaatatatgtttaagttagagataagtggtatgttagggttgggaaggaaaaagatgtagcaagaaatgagccagaattggggtaattatcttaatcttcccaccccagacatttagaaatgggtgccatcttatccactgagcatctgctatgctgttaatcttacgctatgtgaaatacagctattaacaggatagactctttctgcctgtgcagaaaaacagactgtgacatttacataaccataacatggacagagaatcagaatgtatttcacaagcggcaatgatggaaatctaaatatcttctgggaggttcatttatttatttggcaaatatttgttgatcacctactgtgatcagctaactagtaggtgatcacgactgtgtgctagggaactgtggaaagaagacagatgagcccctgcctctttatactcaaatagagaaaataaacattaatcaaaatggttatgaatatgtaattacaaacaggttcgaaattatgaaggagaagtactcagtggtatagagcatatactagggagtgtgaccttttggggattaggaagggtgtttctgaggaagggacatctgatgtgagcatgaggaaattgcatcacaagcagaagaaagagcgttggccggcgcagtggctcatgcctgtaatctcagcagtttgggaggccgaggcgggcggatggcttgagcccaggagtttgagaccatcctgggcaacatggtgaaacccggtctctacaaaaaaatacaaaaattagatgggtgtggtagcacgtgcctgtagtcccagctactcgggaggttgagatgggaggatctcttggaggtctaggctgcagtgagtggtgatcgccacggcactccatacagcctaggtgacagaacaagaccctgtcctcccatccccccaaaaagaaaagaaagagcacggaccctggctgttagtggagggaggagtatctctagggctggaggggagagaacagggtgggagtattggggatgagactggaggtatgcagggaccagactccagggtctgccaaatcttggtgaatatatagtccttagtctaagaaaaatcagcaaagcatcatatcaactcaccattcatgaggtgactcttaactaggggctgtaccgccccctaggggttattttggaattttatggaaccttttgtttttttttttttttggttgtcacagggattagggttatattacatatacatcttattcatttcagaatagtaatgcaaactggaattttgacagtgcaattttgacagtgcaaaatactttatatcctaaaaggatgttttgtctgaaataagattgaaggagccttcccagactgggtgctggggggagtacactaaggtttcttggcaggagagcgggtcctggagaccctctaagaggcctgggcaattccaggcttcactttgagaattcacaggttaggtgccaagtggaattcagctgtgggggatgtcagcctctggtctagctgtgaatagacctgttagcacagaatagcccagcatcatccagaagggcccatccctttatgttctgctttagatgtgtatggcggagggcgaggagggggtctagtttggttcccaagtgcagtctgcacacccatgtcctacttcctggaagttggagagtaaaaagcagcaaagaacctcactgccaagattctttgacctcagcccattcctgacaagaaactactgtcagtgaccaaacaaatgcaaaaataaaatataataaaataagttattggctttattcctaacaaaagtaatacttgttcattgtggaaactttggggagcacaagaagaaaatagactcacccactccctcttccccaagattaaaaagtaaaactaaagtattttatagtagatacacataattttggtggtggtttgtttttcttttttaattgagacagagtctcagttgcccaggttggagtgcagtggtgcggtttcagctcactgcaacctctgcctcccaggaccaagcgattttcctgccttagcctcccaagtagctgggattacagccatgtgccaccacacccggctaatttttgtatttttagtagagacggggtttctccatgttggccaggctggtctcaaacccctgacctcaggtgatccacctgccttggcctcgcaaagtgctaggattacaggcgggagccaccttgcccggctggtggtgtttttctttaaacaaaactaggatgattctatacatattttgtaaatgcttttctttttttttcttcttcttctttttttttttttttttgaggtggagtctcactctgttgcccaggctggagtgcagtggcgcgggctcactgcaacctccacctcccgggttcaagtgattcccctgccttagcctcccgagtagctgggactacagatatgtgccaccatgcccagctaattattgtatttttagtagagacggggtttcaccgtgttagccaggatggtcttaatctcctgacttcgtgatccacctgcctcggcctcccaaagtgctgggattacaggtgtgacccaccatgcctggctgtaaatgcttttcttgctgtttgtttagtatgtggtgcattttgttcgtctgcagtttggtttctaacagtgctgtcatagccagtcatggaggtaccctggttgtgtgtaccatggtacactgtggctctgggagcttccagttctacctgcatacaaaggaggctgtgatgaacctccatgtagagaatcctggtgtacaaatctgtaaatacttcttcaggataattggcactgaccttttccagagagagaaatgaagtgtctcttgcccttcttaggtggctggcataaaacaattctctagactttttaacatctagaaattaatgagtgcccctttatcatccaagagtttcaaggagccaagtgtgatagtaatagtatttaagctgtaatcatatttttggtgtctgatgatttagaaaaggaacagtgacagacagactagaaaattcaaaaatgcttttaaatgctcttgtatttaagtaatggccacagtatctgcatatatttgaagaatggaagttccactcttgcggaaggccttacctattcaggctgcagagcttaaggcttttgtaatcaccggcaagaattcccatccaggacacctcaaataaccacttacagcccgactgggaatcactggcccgagtgaggcgatagggatggaaataccagcccaaagtcctccaggctgcaggcagccagggcgtaagtgggtagaggaggggttcggggtcggtgtgagccccataggttttctggcactgcaggggccctagagaccccggccccgcaagcacgccaggaccctggaatcctaggggattccctgtgtgggccggtgtatttatttaaattcccgttgcagcgaaggccgcccttctgtcttcctgccagccctggcgcttcctgtgcagcgccactggacagccatctgtttcctcccctctgccatctgcctcgcgccgggcccagcgtgcggccctggaagcctggctcggccgccgcccgcgcacgctggccttctttgttactactttggctcagtggtttcctgggctcgctgctcattccctggcagggctcgcggcgtccgcggcgactcctgggatcggcaggggcctggcttccagcccagcgccggcagcagcccgggggctgcggagcggaaagggggctgggacgcggtcactgctccagccacccggcgctcctgggcggaaatcgcgagcagagcccttctcagcctcctgcagaaaacgcgcctcacctgacttgtgtttaaatcagcaagggcagtgacgcggctcttccttttcctggggcagtcactctcctccctctgctgagcccgctctctttagtttactttaagcaaaggttttgtttgtttatttgtttgtttggttttggtttttttgagacggagtctaaaaagtcttcagtctgtggcccagactggagtgcagtggtgcaatcttggctcactgcagcctcctcctcccgggttaaaatgattctcctacctcagcctcccaggtggctggggctacaggcgcgcgccaccacgcccagctaatttttgtatttttagtagagacggggtttctccatgttggccaaggtgatctcgaattcctgacctcaagtgatccacccgccttggcctcccaaagtgctgggattacaggcaccagccactgtgcccggccagtttactttagatagttagaaagaccgattgataaccagagaggcggtaacccgcagtttccacttactactcccaaagggttgccctgaagcttcagaaaaaagctgtgtcatgctcatttgttttattttattctattttgtttattttattttattttatttttcgagacagagtctcactttatcgcccaggctggagtgcagtggcatgatctcggctcactgtaaccttcgcctcctgggttcaagcaattaattatcctgcctcagcctcccaagtagctgggattacaggctcccgctactgcgcccggctaacttttgtatttttactagagacaggtttcaccatgtggccaggctggtatcgaactcctgaccttgtgttccgcccaccttggcctcccaaagtgttgggattacaggcgtgagccactatggccggccactcatttttttaaagagaaaaatgaagatccttctgaaataaatgggaaggggaaaaggagaagttaattaaatgcttttgggtacagagtgaagtggagccttctggaaagcagagagaattactgtatcgtgacttctgaatactttgtctctttttcctcttcagatttccttattccctgagaagccagcgtcagctctcaacattgtttgtgaaaaaatctacactttaaacgtttcctcttaagttatgagagtggtacttaactaaataatagcactttgacctccttaggtgacagccactaggctaggtggtttatgttttgttttgttttgctttttgttgttcttgttgtttgtttttgagacagggtctcactttgccacccaggctggagtgcagtggtgctatctctgctcactgcagtcttgacttcctgggctcaagcgatcttcctggctcagcctcccaagtattaacaattggggctacaggtgcaggccaccacgcctgtctaattttttgtagagacacggttttgccgtgttgctaaggctactcttgaactcctaggctcaagcaatcagctcacctcggcctcccaaagtgctgggattgcaggcatgagccatggtgccggccgggctaggtgttttttatatgtgttaccttgtttaatcctcacaacaatattatgaggtgggtcgtatcattatccccaactcatcgaggaaactgaggcacagagtcataaatactgaaggtggatttggggccaggtggtccaagtccaccacttgagctcttaaaaggacaatttggggtctttttttcatgatcattatgttgtgtatattttcctgtgtcattaaacactgaaaatgatgttgtgatcactgcattcagtccattatttggtcgtactatataatttgttcatttggctcttccttgatgggcaggctgtggcagatctagaaggaggtgctatgagacataacagcaggtgctagtgatgacttcatcctttgccagagatgaattcagctggagtggggaaaactcctcactggggtattgaacggactaagtatacaccatattttaggaagcattttcacattacccaacgttattattatcttcatttttatttctaagttcctccaggaaggactgggaagagagagaggatctaaagtttcaattcctgctctattatgtctgctgattttacatgcaatttccctttgtttaatcttttctttctttcttttttttctttttttttttttggagacagagtctcactctgttgcctagactggagtgcagtggctcaatctcggcccactgcaacctccacctcccaggttcaagcaattatcttgcttcagcctcctgagtagctgggattacaggtgcatgccaccatgccctgctaatttttgtaattttgtagataacggggtttcaccatgttggccaggctgggctcgaactcctgacctcaagtaatcccccctccttggcctcccaaagtgctgggattacagatgtgagccaccgcgcccagcctgtttaactcttctaatgactctgtggagtattcagtttttcctccttttgcttgaacagaagctgagaggttaaaagttaaatacatagctgtccaaagttgaatacatctgttaagttgtggagccagcatttgaacccaggtccagcaagtcttctttttccaccgtggtgtgctatctctccatgtatggaaagccgtctcccacactagcccaccatggtacgcacacctgagggtgactcccagtcagtcacatcctgtgtaattccatcctcttgagtgtgagtggaatctctgacttgcttctaaccaatggaatatggcacaggtggcaggatgtcatatgccaaggtgaagggatgttacagaagcagttagagtcccaaaggagttgattgtgagttaaaagattttctccaggtgggcctgccctcatcaggtaaaagccttagaagaagtactgggtccttcccaaagggagagagtctcctgctggctctgaagaagtgaactgccttgttgagagagggcctgtgaggggccatgtcacaagcatccaagggtcatgcctagaagccagagcagccctcagctgacagccagcaagaaaacgggccttcagacctatggttacaagaaactgaaagccactaacagccatgtgagctcggaagaggaccccaagcctggccaacctcttgttgcagtcttgtgagactctgaacagtggacttctccccagactcctgctccgtggaaactgtgagaagataaatgaatgttgtgttaaggtgccaagtttgtggtaattggttgtgcagcagtagataactaatgcactcacaaaagcctttttatcctgcatcaaagctggatctctgatggctgctccttagcaagggaagatggagcaatagcagtgcagggggcagcaggctcagtggccatgtttatcactgggctgtggtcacatgtcattagattcctgtggagtaaatccatgtgttaagttattgctcttggcatcctgtggcctgttttacatgcaggagctcattcatcattaccatatccctatgagatgttagtattcctactttacagatgaggaaactgaggcagggagtttaaatatcttgtctgagccaagtgtggtggctcgcgcctgtgggcctatctactcaagaggctgaggcatgaagattgcttgagcccaggagttcaaggctgcagtgacctatgatctatgccactgcacttcagcctgggtgacagagcaagaacccatttcttgaaaaattaaataaacaaataaatatcttgtaagttatacaaactgactccatcttcaagctgtcagcctcttctccgtggtgttttcttggagcaagtccaaagcaaaatcctgatgcaaacagtaactatggttgtacattgttaagttgtatttacttttttgaatagataacgtttacacgatcaagattcagaatgtaccaaaagtcccccagttgtcagttttcctctctggaaatatacaggaggctactggtgataccagtttcttgtgtaacctttaggagttatttcacacttctgtgtgtgcctctcctcctgtgccagataagagcatacctacgcccactgctctatacttttattacctaactttctgacttggaggtaattccatatccattcagaaggtgtccgcattctcctccttttttatagctgcattgtattccagagaatggatttactatatttatttaactagtcccctactgacagccgtttagggtatttctcccttttgttatctagccgtgctgtaatggttactcttgtacatatcatagtcttgtgtatgtacaagaatatgagaaggagcaactcctggaagtagaggacctgcacccaatgttgcatgcttttcaacatttttgcatgtgttctgaaactcagcttctcaaacatcaacttgtgatcttctcccagcgggctttaggggtcttccatgtctgctgtcatggagaaggactctacttagtgttgggacagtgttcagagttccactgctctcatatcccactcaaatttctttagcatattaggaaccagcggagtctaagtagggaacaagaagacctgcttaactagcatttttcttagtgtttcccaaggttcgttacagggagtgttcaagtcagcttccctaaaagcagaactagtagatatggggattcttgtgcaactggtttattgagcgaggaaagtaagcaagggtagaaagagcaggacaaagacgagtttcagaagcccagcctcagcctgattctatggggaacactggagagtgaactgcaccacaaagattgccctattttgaggcaagggagctgggcttttgtacacctttcattgcctacagaccagaaaggagggtacataaactcccagggatctctgaatcagacagctctagttgtccaagggaaatcactagcagaaggctgcaagcataatgagttagcagcagcacccgcagtagctgggggatggatgcacagacctggtgaaagggaacctgggaatctgaacagggcaccaagggagtccctgctggtattccataggagccatttgaattgtagaattgcctcccatctatctggtgtctgccaaggctttaagctgttgtactttggggacatacaaatctgaccgcaccttccttccgcttgcaaacctggcttatttgttttcttgcccaggcatgcccctggatctgccatgccaggcagctgccttacagatctcataagatttttgatgttactttttcctgtccactgaaagagttgtgttatatttttcaactctcatttgaaacaagggaagggaaaaaaatgtttactgaacagaaaataaaagttaatgggaagccaaattatttctgcagccttttatgggagagttacaagaaatgtcacagtaacacaaataactcgaccacatcttttgtaactccttggaaagccgtaaggccacaaccacagaaaaagtttcctgcagatcagatatttgatttctggagtgggggccttcgtgacacatactgttttcacctgggaaaggtgaaagaggcaacacagacccttgtgttgataatgtgacattggtttttcaagggttcctcagtgtccccattatcaagcagtgcgtcttgttttctggctaccatgttgagcagaggaaagaactctgtagcataacatgcatcccctgggcctgatgggggtctgcgtgctgacgggaagtctacgaggtttgtgatgacatatatcctgaatttatggatgtgatcactactgtaacttatagttgccttactgtagtttaaggataaaagattattttctagatgtagtgtgttgagtgatggcccctcaaaatatgtatcttacttcccagaacctgagaatgttcccttacttggaaaaaccgtcttctcacatgtaattaagttaaggatcttgaaataaggggatcaccctggattatatgggtggaccctaaatccaatgacaagtgcccttgtaagagacacacagagaaggtgatggtgacatgaaggccaggcagagagtggcgatgcgtcaaggaagtctctcccagagtctccggagggagcactgtcctgctgatgcgttgacttcagcccaatgatagcgatttcagacttctggccttgagaactgtgagagaatagatttctgttgttctaagccaccaaatctgtaagcttgctacagtagccacaagaaatgaatacaaccaattaaatattttccattacaatcagatgctaaaaatcttcaacattgtagactgtagacatttaatattttctccttttagaggtgctttgctcatttctaggaattaactttcggagaggtgatggccacgctgtctgcctctcagaatggcaatgacatctcatccactttgagtacatcttttttccttgatagcttatttaatgagagaagcagtccttgaatttctgctgagaaaaacggaacaataaagacaagaaaacatcagagagtggttctcagatggcagggtgggggcaaaagatggaaaggacgttccaaagaagcattgcttctagccttccacagatgatgaataaagtatccccagattcccccaaaccatcagaatgccaaataaatcttactgcatcctagtagaatctttaaagatgagctactgcagcccaaaaacatatgtattaaagtggtcaaattagcattgcttaatctagtacttgtgaattgggtgctatctttttagtgtttgtagaagtatcagatgattttaagtctcttaattatatatttttgtaactttttttttttttgagacaaagtctcgctctgacgccaggctggagtgcagtggtgcaatcttggctcactgcaacttccacctcccgggttcaagcggttctcttgcctcacctcctgagtagctgggactacagtcacgcgccaccatgcccagctaattttttgtatttttaatagaggcggggtttctccatgttgaccaggatggtctccatctctttccctcatgatacgcccgcctgggcctcccaaagtgctgggattgcaggcatgagccactgtgcctgggccgtaactttttatttataaataatcccaggtttacaaaaacttttgaagaacaggacaaagaactccccatatccccttgccccaggttctccgtttgttaccattttacatttgtttgatcgttttccatttgtatgcatgctattatttttttcttggaaccatttgagagtgagttgcagacatcatgctcttttgtccatgagtgcttcagcatgcattttgtaagaagaaagaccctttcttacataattgcagtacagttacttaaatcaggaaattaatgatacaaatgctattaacttatctacaagccttactcagattttgccattgacccactaatgtccttgggtctaggatcccatcccagatcataaggtgtattcagttgtcacatctctaatttccttcaatctggaacaggttttcagtctttcttgttcttcatgacgtcaacatttgtggagagtccaggacacagctgtcccttcattggatattaaagtcagtttggtgggaccctctgattctcagcattttgtagctacactggaggcagaagacaaagaaagaaaagaaatcatgtttggcataacttgtctcaatttgaatgcttttgttttcacaaaagtcccttttgcaaatgtcttatctgaagttaatagttaatagttcaagttgagctttgctggatgtcctgttcttttaaaaagccttagctcagatgtcacctccttgggatagtggctaactagcaagtcttattgtatgaatttgatgtgaatcacctcatttaatcctcacaatagccctatcatttaggtactcttattttgcgtattttatagtgaggaaacaaaaacaaacccaggtctagggtgctctgcttcccctctggactgccccctctcctgccttaggagggccttcgtcagcccctcagctaaagtagtcccctgcaccaccctgctaccatcactctatcctgtttcccggttctgatttcattacagcactttgccagccagaatccctttgttcacttaattacctgtttatggtagatcttctctaccaagacctgagctgcagaggggcagccacctttctgttcaggtcaccacggagtgtccagttcgtaaggtggtgcctggaacacaggaaatactcatcatcttttttcaaatgaacacatgcatattttctttgacaaagcctttggtaatagcactcctttccaaagagtcagcatggatgaagtgcttgagagacttgggtcttctccagaagaggaaataatgctgtgtcagacacctgctgagggagggggctggggtgtgggcccagcagtggaaagagcccttctgccaggcccagaacaggccatggggcctggggcacatatcttcaagcctgcgggccaagaagctgggaaaagtcacagagaggctaggatgcctagcaaagagaggctaggattcctgtcctggagcagcccactcccaccccccacagtttgcgatagagatgcagttttcgtagtagctgttagcctgttgtgatagcacctttcttttttctttagttgagttgacaggtttcgacagactcacaatcaaaacaacagaagcaaacagagacaagcagagggatgacagaagtgtctgtcagctcatcaagctctcagggcagggtttctaatttaaagcaacaccaggaaacactgaatagtgggattactatattggattaaaggctaaaagaatcaaatgccagaagtggcaagctcagtttgtgatacctttcctcactcgagtgttagccatttggtgtggccctttgcctggcagaggcgctaccttaagtcacttcatcagatgtttattgaatggctgctctgtcccagctctgtgtcagccgcaggggatacagctgtgaatgaggcagagccggcttccctgtcgctgaaaatcaagaccctaaacaaggatggtatttcatcacctcgaaggcaccattgttttaggcactccctaagaaacaaagaaaaataataattatgtggtaacacaaatctctcttatcgttcaggatttttgtcttatgcttattgaaagaactcttttagatttaattaaatataaattttacatatttttgtgaatatataaaaaggaaaataggtgaagaaaaataaattggttaagatatccctaaaatttttttacagtcagagccttcctcttctaaatctttttatttttagaatatttctacacaagctattgtcctctatgctatcaagagtgtgagccatgcagcatttctcagaagaatccacacaaaaactaaaagccatcagtgctgggtttgtgcactggcttttgactcccactttgggaatgttgctaagtgaccccctgagtcactgtccccgccatcagtcccataccctgggggtcaaggtgctctactcttgtctctgagattttcttcctcctgctggcacctatgacacacgttttgatgctggtgtgtctgaccttgccacatgcataggcagtgataactacacaactgtttttccagtggtcattgaaacaccccgacttggccaggcgcagtggctcacgcctctaatcccaacactttgggaggccgaggcaggcggatcatttgaggtcaggagttcgaacgaagctccaggctgagacctaatgcacgggaaggggcaaggcaggagggaaaggtggaagggtgtcctggagaagagaacagtctctgcaaagtcccagagttgggagaaaaagtacaaggtttgcaatcttcttggtcagttcataaagtaggctttttgctagtggtgaagtatggaggatctgttagccacaaaaatgttagtggttccattgggctttgccaacatccccaccatagctaactgtctcgtagaagctgctggaggaattaatgatgcagtgggcatgttaatatacctaaattaaaatattcattgcagcctgggtgtggtggctcacacctgtaatcccagcactttgggaggccgaggcagacagatcacctgaggtcaggagtttgagaccatcctggccaacatggtgaaaccccatctctaccaaaaatgcaaaaatattagccgggtatggtggcgcacgcctctagtcccagctactcgggaggctgaggcaggagaattgcttgaacccaggaggcagaggttgcagtgagctgagatcatgccactgcactccagcctgggcaacagattgagactgacacacacacacacacacacacacacacactgcatcattaattcctccagcagttttttttcatctgggtcttaagttgaagggattttatagacctagcgtttttttttttaagtttttgagatgtttgttactacacaaatatgaatagggaaacattaatataattaaatctgaaagttatttgaaacaactaaattcacccatacgcccaccattccacagtttctacaatgttatattttggcccttgtttaagaatatgtgtaaagtttgcagggctgttaccctactgacaataatagattctgctttgttgcttatttttctattacaaaatttaatatttggtaatgtccctgttgctataaaagcttcataattgcacataatatgtacaatcatctaagtggatatttttaaatttatgtgaccactcacttttaaacatgtaggtttgcttttgagcttttagctactataaatgatattacattgaacattttcaggggttggcaaactacaacccacagaccaaatctggcctgccacctgtttttgtaaataaagttgtattggaacacagccaaacccattcattcatgtattacatatggtcactttcacactagcactgcagagtggagttgcaataaagattgtgtggcccgcaaagcctaaaatatgtcctatttggtcatttaccaaaaagaaatggccaatcgctgttttacggtatgcagtagagttttcttttgacttagattattttccttaagataaattctgagagatggatatttattcacaggatatataacttagtttgttgatttcaaaataacctctatttgtaacatgattatgaccttaaagacagtgacatatcagaacaaatgaattagctgattcattgatacattcatttattaactgttataagattagagtgattagaagatattattaacacacctttggtccatttcatttgtactcagaggtaactaatcttcatctccattataactcctctaatagcacccagttcttttcattcacagtgtttctcatagttttaaatttttttattagtgcaacactagctgctgtaacaaataactctcaaacgttgctggtttgacacaatagctttctccctcagccatttaggaaccccagcatgggggttcctggtcagtaggcagcttttttcctatgtggctattcaagtttgggccaagatttttctattctttttaaactacttttttggggaaagagcccacttaaacagttgcagtggccatactggtgtgtgcccaaatatcccctttattgctgaggcattcatcccccgcaggttccaagaatgtggcctgctgagtccctccccacaaattgatgtccaccaaagggactcgcctcacccaagatgatgcctaacctctccctgggggcagcctgtatccagtggtcagtggagagtcaggaaggcctggtctgcttgcttcaacagagaaaactctgaagagcggtcctagcttcagtgctcctcggagtatcagccaaggcctttgttatgactgctcaaatcctccctccacctggtcctgtcttgcttactctcccactgtaatctcttggagagcactccccagttaactttttgcatgcaaatctctttctcagagtctatttccagggaattccaccaccccaggaccaaatgaccaagctacattttcttggttcagttttcattcttcactttccactgacgttgaaagtttgcaccttctttaccgctgtatttcagcactgcgttcacagcttctgtttggtgcaagtctctgctcgtcccctcatctttgacatttcttactaaggctccttttattgcctcattactttaggaagaggtgaagtacaaattaccaagataataaatattcaaattgcacagaccatgtgcccctgaacagatgtccactctaagtcaatgtcaatctccatccctggggcaaggggagaggtgaagaaactttaccattgaagcttcatgggaggaaaagggacgctggggaagtgtggcttctcttgagtttctgattcatacacaggaagagattccttccagaaaattcagctaaggaagaggaaatgataacccaagaatgttatgatatggagcctgccaattctttacgacaacggaagtgctgcagggacccagtgagagttttacttttgcatttagctcttgtgggcagagcatgtgatgcatgccaggaactgtgcgtagtgcttttcaggtattggaagagctctctaagtggggtactatttgtcacccccactttccaggtggaaaacaggccctgggaggttacatagcctttccaggttacacagctaagaggcaatgggaatttgaccccagaactgtttgactccaaagccaagctcttaatctgtattgtcttgcctctcttctgtagaggccaaggttgtccacagtctagcccagggaccagccaaagtactttagctggggatggaagtaaacctgttcaaaacgcagattcctgggccccagctcagacccactggattaaaaactcctctggctgacgagatcacgccactgcactccagcctgggtgacagagcaagactctgtctcaaaataataataataataataataaactctggctgaggggcccagggacctgcattttaatgcatccccttgtggatacactctctaaaggatgagaatgtcaagtagtgactttctcactgccatacagatcacaggccaccttcataacttcccttgccttgtgtcaagcaaaccagcagggacctgagaccatcagcacctttgtgacacctgcaggtcgtcttccactgtcatgctgccttttcagtaggccctcctgttgggattaagtactttctttcatgctactcttcatctcctgataagggagggaaactgaggcagtggaactgctggattcctactcctcagtgaaatcttgggtacatcacctgccttctctatgcctcagttccctcttccgtgagatgggggtgataatattacctgctcagggttactgtgcagatcttctctgaagtatttaagctctgagtgaatgttagttatttttttattacctcctttcaatagtctagtgagatctttaatcttttctccagaagttagctgggtctgttcttgctattccatattcataatattttctacaaggtcttcatttcctttttccctttgcacatctccaacttgcctctgcaaatctatgctagtccctttgataagaatattagattagcacaggtctgtgtctgcatgaggagagagcccacttggtctttgttcaaggtatctcagacgtttcattttgtatttagctgtcatctgtagagcatgtcatacatgccaggcctgtgtttttgacttagcatagacatcaaggtgatgaagaaagactattgggttggctcttggctctgctgcccactacatgggtaggtaatcttgggtaaatcacgtcccttctcttggtctcagttttctcttgtgaagtagggggaaagtttttgagatcagcattgttctaattatgatatatatgtgcacataagtacttttttgtgttttgttttgttttggttttgagacagagtcttgctcttgtaacccaggctggagtgcaatggtgcgatctcgactcactgcagcctccacctcccaggttcaagcaattctgcctcagcctcctgagtagctgggattacagatgtgcgccaccatccgggctaatttttctttctttttttttttttttttttttttgagacggagtctcgctctgtcccctaggccggactgcggactgcagtggcgcaatctcggctcactgcaagctccgcttcccgggttcacgccattctcctgcctcagcctcccgagtagctgggactacaggcgcccgccaccacgcccggctaattttttgtatttttagtagagacggggtttcgccttgttagccaggatggtctcgatctcctgacctcatgatccacccgcctcggcctcccaaagtgctgggattacaggcgtgagccaccacgcccaaccataggtacttgttaagaatgaattgctgggcaagctcaaaaaagcctgggctctggtgtagatgaactgtgagtgttgggggctgtggtattgctttaaggtttttcttttggtattaagaaattccagggcagagaaagtcagagaaagtcatttctatggaaatgaagtgaactttttacaaagtgtactaagggctgggacctctgaatttcatctcttcttcacaatctaactgtcattccacagcagtgtcattgtgtggtttctcagcagatgtctttttcttttaagttttttaaataagagcattattgagatagaattcacatactatagaaatcatctattcaaagtgacaattcagaagtttttagtctgttcacagagtgtgtaccgtcatcaccacaatcaatttcggaacacttagaacagttctgtgggttttgacaaatgcatagagttatagatccgtcaccacagtgtgtacagaacagttccatcaccctaaattccctcatgctgccccttcatagtcaatcctttccccaccttgtaactcctggcaaccattgatctgtcttccatccctatagttttactgtttccagaatgtcgtataaatggaataatataacatgtagctttgggagtggcttctttcacttaggaaaaggggtttaaattaatccatgttatcacatggataataaaaatattctttctattactgagtagtgttccatgatatggatatgtgtgtgttcaccagttgaaggacatctgtttccagattttggcaattatgaatgaagttgctataaacattcatttacaggtttttcttgggtgtataaatgtaagtttccatttttcttaagtaaatacctatctgtagttttgttgggtcgtacgttaagtatatattcaaatgtataagaaactgcaaagttgttttttacagtggctataccattttgcattcccacagcagtgtatgagagttcttgttgtttaccacacttgccagcatttgatattatcagtattttctagtttgggttttgcttaattttagctatccaaataggtaggtaatgatatcttactgtggtttgtttttggtttttttgtttgtttgtttatttattttagacaggttctcacctggtgtccaggctgaagtgcagtagcatgatctcagctcactgcaacctccaccttctgggttcaagcaatcctcccatctcagcctcctgagtagctgggactataggcgtgtaacaccacacctagctaatttttgtattttttgtagagaccaggtttccctgtgttgctaaggctggtctcgaactcctgggcttaagagctccacctgcgtcagcctcccaaagtgctgggattacagttgcgagccaccgcgcctgtccttattgtggttttaatttccatttccctaaagactataatgttgaacatcttttcatgtgcttatttgccatccacatagcctctttggtgaagtatctattcacattttttgcccatttttaaaaataggcttgttggttttttatttttaggttttgagtattgtttgtatattctggataaagttctttgtcagaaatgggatttacaaaatgtttccactgctctatatgttgccttttctttctcttagtctctcgaaagagcagggcaaaagttaactctgataaagtctaatttatcagttttttttccttatggattgtgttttcagtatcttatctaaaaactcttttcctaatccaagtcacaaagattttctcctatgttttcttccagacgttttacagttttatattttaggtctgtgatccgttttgaattaatttttgcataagggttaagtatgggccaggggtcgttgttttatatatggatatcaagtttttctagcactacttgttgacaaggatatcctttctccactgaattactttacacttctctcaaaagaccagctgattatattcatatgggtctatttctggactctgttttgctgcattcgtgtatttgtctaagctttcaccagtaccacactgtcttgattactgtaacttaatagtaaatcttgaaattggatagtgctcttttgcaaagttgtttttggttattctcattccttgcccttttcatatgaattttagaatcagttttccaatattacaaaaataacagtaataaagcctatcactgggatttgattgaaattgtgttgaacctgcatatccatttggggagaattggctcattaataatatcatgaattaataatatctatgaacacggtgagcccttccaattatttaggtctttgatttctttcaccagtgttctatcgttttcaccatattgtaaagttagatttatacctaataaatatttccctttttgctgctattgtaaatagtcctctcctttgtgtttaatttttaacttcagttgttcattgctaagatattgaaatgcagttgatttttgtaaattggttttgtatctcatgacattactaaagttatttattagttctaaggaggtttttagtagattctttgggattttctacatagatcattatgttgtctaccaatgaagtagttttgtttcttccttttcaatccatatgcctctatttctttttcttaccttattgcaacttccagcagtataagaatgtgagaaaagacatcttttccttgttccctgtgttgggggaaagcatgcagtatctcatcaagtatcatgttagctgtgggttggtttttagatgccctttctcagttaaggaagttccctcctatccttgcttgctgaaagttttgttttgttttgttttgtttaatcatgactggatattgaattttgtcaaatgccgctttttctgtctcagttgatacgaatatatggcttttcttgttttgtctgttcataaggcatatacatttgaaacatttggaagtactgaactactcatgcattcctgtgataaaccttagctgtggtacatttatatttcttatatatgttggatatgatatgctaatattttatggagggtttttgatagcctggagtttctctgtaagcttgttaatgactcaacccactttgcgtccttccttttgagatattcatgtattcatggtctagtgtgggttattctgaatcctggtctctctttcctctctgtgtggttagtgttcttttgggtttatctgtttctcctttttgcctacatgttagaaaaacttgaagttatgcagctcaattcaggaacaggatgtaggaagaagtatttgagtccagtagctagattcaaattgatttgcgtcacattattgaggtcctaccaagtgctgggtccctgttgtcaccttagaagaacagtttatttgtgtttatctgagcagtctagttctccattagcaggcacatgagaggaggtattgttgaggatgaacctttcgtccatgtctctttgtggcctccctgtttcctccagatgcatccagatcagggcagaagcagagcctgcttcatggggactgaaaggccttctttgtctttccaccaggaggcttttgcagtggcaaggaggcctgagaatgaccccgcaggccgggtgaggggaaatgtagggagtggccaggttccagcctaacaggttatttttaaaaagtgaagcccaatgaggtggggaactttctgaagggaggtctttgttttcacttggcactcagatgactcaaaagtgagaaagcaaaggagaatgcaggcagcaggggagggctgactctacgccagccttctgaaatgacttcagctgtacctgggcctgcaggtcacaatgatcatgcctttgaactggggacacggttgaaaaggctggaggaggaagaaaggggcaaggtgtccacgccatagtcccactgtctgcctgactgaagggcggtttaccacagctggctttttgttccctaaaaaatgcagcggccagagagcaggtgggagaggccctctctggggagttgttcctcagaactgggtctgggggcaggagagggggccagctaatggcctgcagaagtggcaaggcctgctgcctgcttgcttgactcagcggtttagtttatggcagagtttgcacagacggaatcgcttgagcatgttgtcaacaatctgaggcagccaagccagccagggaagtttttttgttggtctcaccggctgtctggaccctcccactggaggcgaccctgctccccacctcaccgtgcagcctgggtccctggaggctccctgggacattcctgccacctgctgccctcctctcccacccagctcctctcccttttcttctggccactattctgatttcagtccccattgccttgctggaactgacacagcctcctacaaactgacttctgtgtcttttctctcccatctccagtccacctgctactagattcattttcctgaagaacaattctgctgtggctcttctctgctcaataaccttcactggctccccatcgcccacctagcatatctacttcctcagcctggaatctgatccccaccccatcccgccagctttgcttcccatcacacctcttcacatacctgtgcagtttgcctaacatggacaacaaccctcttgttcccaaatatactcttgtgctttcccacccctatgccttctgtggctgtgttcccactgccagaagcctctgattccccttctctgtgtgttggaatgcttttgtggagtccacaccagggccatgtctgctcttcatacgggacatgcctgaccttctccttcctctattcctcacaaattgtagctctctggtggtatttatcccctgttttgttgtcgttacttgtgtctggatcttaagctccttaccctttaggacagggtccgtgtctaagctgtcctcatatcttgctcatctcctggtgacaacacactgcacttagaggaatcatcatttttgtgctactttgtgccaagacctcaaacattatcctatttgttcctcccaagaaacttctgaaagaagttttaatacctaacatttgttgagcatttactggagcagtaccaggctgttctaaatattttgcctgaattagttcatttaatccttgtattaactcattaactctttgtagtatatttgattattatccctcatgccaaagatgaggaaactgaggcccaacggggtgaactagcccctactgtctgtgttgagtgactgtctgacctgtggggttgctagccatgctttattgctcctgtttggccttccttcctctgatggaaggcaagcctttggctaacactcatacttccttccccaggccccacagggcacaacgtgatgatcacacgttctcaacaatagtgatttttcatccgtgacacatgcttacaaatcccttaatggcttttctattcttgttttgtcgttttttatcccagactaatttcttcttccccaggctggcacttatttggcattgtgctgcctggggttttaatcaaggcggcctacacccacattgtgaaactcaacaggcactcacttctggcacgggcccagggctgggtgccaggcctcctgctgggactggccccacagcttctccaaatatttatttccccaggatagtggcaaaagtactcagcagcagaactatttcttctgtgtcaaggttccttaggattatctttggcaaaatggcaaccagtgccgtctcgtagccctaatgccaagcacagagctggacgtgtatttggccatcagtagataatccttgaatgaataacttcattctcctttcctttttaaaagctagggttgcctgactgggaaaccaggaaaattctgaaaacagatgtatcagttagcttttgctagataacaaatacagacacttctcaacttatggtgaggttactcctgagaaatccattgcaagttgaaagtactgttaagtcaaaaacgcatttaataccctcaacctaccaaacattatagcttagcctggcccacctgaaacatgcccagaacacttacattagcctacagtttggcaaaatcatttagtacaaagcctatttggtaataaagtgttgaataacccaagtaatttattgatgttctactgaatgtatatcacttccataccattgtaaagttgaaaaatcataagttgaactatcataagtccagccatcataactgtaggcacaaaacctcagtggcatacagcaataaaagttcattgctgacatgactgaggtcagctggggattggctctgctcattataaattaggcttgcttctgtggctgggggttggctgctgtcatctgatctgggctggcttctcctggggtaactgcagtgacagcactgtccacgtgcctctcatccttctgaggccagcaggctagtagctcgagtagagaaaagtggtcagataattgcattgtcacaaagcacacattgggtggtatgagcacaccaaactcaaaaggacctacctttgctgtggcactgaagagtggccacatttcattttaagaaaaatcaatatgtagatatatttgctggtagaactctcttttcaaatggaatcttacagagaacatgagtaaatgattcttataagctgctcaggggtaggggccgagaggagggtggaggcagaagttgtgtgtcttcctactgctccttctcggtttctgtggctactgggaagccaaaaccaagagctctccaaagtgtctctgtcactgacattcttcattgacctgaagcagagcgtggagcccccaggcccagcagttagccccgtcagagcctctagcctgcagaggattcagaatgagcagaactgcagtgatgtagtatggaggtgggggtttatcaagctattctcaaggtttggccaccagggtggtttcattctataatattcagtaacaagcttctcagaggtgacagctgccttttagctgagccatcctaagagtatctgctgaggacacatttttaagccagccccccaggtgcaggtcacagatggtgtctctttcacctgtgcccgtcactgtcctctggatagatttcagcttccctgtgcaaagaatcaaaacatgaaacccagaacagtgcgtatgttactttcaatagaggccagataggacctttttctctttaagtgcttgttccataacggattactcaaaaatttaatggtgtaaaacaaccacttattcttacaaattctgcaggtcgggaatccagacagggcgcagtggagaaggcttatctctactccacaatgcctgaggcctcagctgagaagacttgaaagctggggccagagtcatctgaaggcttactgtctcacattgcagttgatgctggctggcggccttatgggctgtaacacctacacatggcctctccagtgctctaagcctctcataacatggtgccagggttcctagggcgagcagcctgagagtgcggaccagaaagaactggtattgtaggctgcgacctcaccttgcagatcacgtcgtgtcacttccatcacattacaggcggccaccaaggcctgcccagcttcaaggggagaggaaacagattatacttcctgatggggagtggcaaggttctgcaagagcatatgagactagaagtatcgctgtggccatttttggaaaacacagccacagtacatgaacgcagtgttgggtgttcttttataccccattaccaaggccaaaggattcagaatatctggttgcagggagcttgtttaagcctcttgccccctctcccagaccactgagcccttggggaaaggtttttttttttttgcggctggggggatacatggtctcactctgtcgcccaggctggagtgcagtggcttgatcatggctcactgcagtctcaacctcccaggcctccagcaatcctcccagcctcggccttccgagtagctggaccacaggtgtgcgccactgcacccagctaacttttcaattttttgtagagatggggttttgccgtgttgcccaggctggtctcaaagtcctgagctcaaaagatctgtccacctcggcctcccaaagtgcagggattataggcatgagccactgtcctgggaaacctttatagttagagctttgctgaaaacagaggccagaggcaaaaaacatagaaaaaacatagaagaggcaggaagcagtgtcagtggttaagaagcagaccttgcagccagatggaaaggactgaatcccagttctgtgtaaacagctctgtggtctagagcaggtgcctctctgtgcctcagtgtcctcatctgtagaatgaggggcataatagggttgtcataataatttgacagccctatgcctggcacataagtgcgtaatgagtattagccatttatgaaaataattatcattattggtattatttcggctccttataaaaaaagcttatgtctcagcaagggctgtagatcctgccccactcctgccagtcctggagaagatttcttggcagtcacacccttttattttgttattgacctcatcagggagcctgtgggaaacatgagctcctaatcccagtaagaccctagctgtatatagggatttcatttgtctgattttatctagttacccaggtcttagaatcttgactttccaggaaaaaaaaaaaataaaagagcatttaatgtattttctaaatttttcccatttgtaaattaacatgctctgtttcctcaattctaagctcccaccaaccttaagaccattgatttttataacttgttcggttggtgggggaagagtgccaatctgttgtatatatagtacattccagtctcaacaacattaaaatgtagaaaggtacaaattggaattaaggaaacacattgagttcactagaatttagaagtctagaaaaacaccttagaactccttataattaggttgggtgtgtaattttaacaggatatttttgagcaggaaaggacaccggtcggcacctggtcacaagcataaaactgggatttggctgggtgtggtggctcacgcctgtaatcctagcactttgggaggccgaggtgggcggatcacctgaagttgggagtttgagaccagcctgaccaacatggagaaaccccatctctactaaaaatatgaaattagccaggcatggtggcgcacgcctataatcccagctacttgggaggctaaggcaggagaatcgcttgaacctgggaggcagagtttgcggtgagccaagatcgcaccattgcactccagcctgggcaacaggagtgaaactccgtctcaaaaaaaacaaaaaaacaaaacaaaaactgggatttgcctgagcaaactagaatatctgctcccctaacctaaaaccctgagttaaaactagagctaaccacagttaacacaccaggcacttggcttccattttcttctctcagtggttatattttcacaccatgagtctttcttaacctttttaatatttatgtcatgaatattttcccatgttatgaaagcaagattatttaaagctacatttttcataattacaaaatagtaatatttttaatacagaattttaaaaaacacagaaaaagcatgaaggggaaataatcacccataatgccatgacccccaaagagtcacagttgacattttgtctgtagtatttttcttcaaatatattatctgtggttttattagggtggcggaaggggtggagttacaacttctatgcctgattttttttttctttgctaggtgaacatttttgttaatggctacatagtattttgtcataaggctaaactataatttatctaattaacaagtactatttgatatctacaggttttgtaatttttccacttttataacactgtcatgacttgtaaataaatcttggccgatatgcatgagtgttttaaaattattagaggtgaagttattggttcaaaggatatgcattttttttagattatttgataatttaatgctaagtccagaggtgccttttagacccaagctcaaccatcaacccttaaatgttagtagttatttcactacttattatatactttatgatgtgctatattatatacttactttgtgtcaagcacagtgctttatatgtattgactgattttaccctcataacttcctaatagagtatatgatcacttctattatataggtgaagaaattgagacatgataaagttaaggccacaccactagaaaatggcaccagccattgaactgagtggaaatacaactgggtttacacagaaatgaactcagggcatggctggagggaccactccctggctgctatttatgaaaggttactgacttctccagactagctgagtagcccttcctagaagcccaatacttaatctaaggagggacaaaggtctggtcccactgagcaggacaaacacgtagtgagttcttttattgagtggctgccttgtgagatccaaagaaacccaaaccctgcctggatctgaaggaagtttcttctcatgaagggcatgagaatgagactggaaggagctgtggcagatgctagagaaagggtgggcgggagaggtgccctcggtatggggaccaggagggcaagagagtgcttcttagacagtctgggactgtataataccatagccactagctacatgagggctatatagatttagattaatgaaaatcaaattaagaattcagttctttggtcacactagcccattataaaggcttagtagtcacaggaggccatgggctgccatattggacagcacaagtagagaacatttccatcatcacagaaagttctattggaaatctgatctagaagcaggagtttggcagggggcagattaaaggatagagaatgacctgtagtctatttcaatttggacatgggtcacgcatgggaaagtagaagcagacgttggaaagggagtttggggctattccttggcgtgatctgtgagcttcattttgtgtggactttgtattagacctctgtagtgtttaggataggaagtctcattagatcaaactcttaagtgtctgtcatgcccatagcctcttctgaggaagctatgccagtatgtggcatcacctaaccctgggccaaactggctagggcagagactgcattgttcatagtctggacacaaggaaggtctgaggcccatgaagtgatgggtaaatacggtccttcctgtggagagtgtgctgtgagaggggcttggtcccagaatacatggcagggacacacaggagcaggagagaaggatgcccgcttgtggctataccctgagcagtgaggaaggcccaccagctctctccaaagcctgcctgagaggtgctgagagggctccccaggccctttgcaacaaaccccattgccagaggtggccagagtgcagcctcagtcctccctgcagcctcagagtccgactcctggggccacctgcctgaccttgaatttttccttcatttcctcatctcaatactaaccagatcggggtacctcatggaggagaaatgtaaaataaacaggagtttcaatgaactgtcaattaggaaggggtttaagtgtctgctgagcctctagagagcaggaagtcaagggtgtctgtgagattcaggcaggaaagaggtttagaaaggagcgaagctgaggtgttgtggggcggcttccctgttgggggctaagccggcctgggctttggctgtaaggagtcagtctcatcttagtgtgagcccttttgctcctttttctgcttacataacatctttgtttggcttgtaaaattataccatgccagacatatttccagacacctcaggctcttttctctaccaagttgatccaagcagcttggttgtttttccagccaatcctgatcgtcattgctccagaaggtttcttctattcttcacagagacttagatgagctgtgttcagcccaccttgcacctgagagtcgtggaaagccgcagataacagctgcccacctgtggcccacctggccccactcagacaccagccagggtttgcttgactgcaccagacctgctcccaccaaggctctgcgctggtatttgcactggtaacttttgtgaatgtagagcctcatcgtttggtctggctgtggtcagaatgtgaactattgcactttcattcagtttatcgaaaggaaccaaaaatcgttgtctactcttgaatgaagccccattgtgtatcacactgctcgaattgcttattaaacagaattattattttatagttttaaaaataaaaagaataatttcacaacttcctctcatgcctttatgggaagagtgatgactgcaaatctgaatccttttttccccctcccctcttttgtcttaatgactgttaattctttctctaagcttattgagtagtgtattttttttttttttttgagatacggtttcactctgtcaccctggttggagtgcagtggcatgatctcggctcactgaaacctccacctcctgggttcaagtgatcctcccacctcagcctcccgagtagctgggactacaggcatgcgtcaccatacctagctaatttttatgttttggtagagacagggtttcaccatgttgactaggctggtctcaaactcctgaccaagtgatccacctgccttggcctcccaaagtgctggcattacaggcgtgagccatcacggctggctggagcagtgtatttttttttttttttttgagacggagtctcactctgtcgcccaggctggagtgcagtggcgcgatcttggctcactgcaagctctgtctcccaggttgacgccattctcctgcctcagcctcccgagtagctgggactacaggtgcccgccaccacacccagctaatttttgtatttttagtagagacggggtttcactgtgttagtcaggaaggtcttgatctcctgagcttgtgatccaccctcctcggcctcccaaattgctgggattgcaggcatgagccactgcgcccagccgagcagtgtatttttaaaaaaatgttttatggaaaatttcagctatgcacaaaagtagagagaatagcacagtgaacacttgtgtacctgtcacccgactacaacaatcatcaactcatggtcagtccttgtggagctgtggttccactgccatgttattgtttaacagctttattgagatacaacttaatatcaaaagagtcgttctttttaagtgtgtgcaattcagtgatttttagtaaactgatagagttgtgcagccatcactgtaatccaatttttgacacttctgtcacaccccccccaaaagatccctcgtacttgtttgctcccatattgttgtgaagcagatcctgcgctgtttcatctcatctgcaatcattacataatgtgtataaattgctggccagcgtgtctgcttgtcatggcggtgcctgctcaggccatccccattctgcttatgcctttataaaatcacatgtgttcagggctgctccctattacaaaccccagagagcctgcactgagcctgctggccatttttactgttgagaattcgattcaaccccagattcagttctacatgacttattgacatcctactatgtgctgggcactagggacaccacagtgaatccatgtagtctctgctgtgtgcacttaaggtcagactgtacacacagttgatgatgcagtgggtcagaggcagcctcgatgggatgtgcgcttagtagcctgcttgtctccaactgaagcatcattctggcctgatctacatctgaatgtgtgtgtgtgtgtgtgtgtgtgtgtgtgtgtgtgtgtgtgtgtgacacagctctcctgatgaccctttgcttctgagtgtaaagcccctacttgtttcaggatggacaggagagagtgaacgtgctgctgtcatcccacgtgttagagataagactttgccccagggtgatggttttgtgtttctttactcacctctcctctagacagtacgtggagagggagtaagaacatcgcctagcacaatgcctgggccataaaaggatataaaattgcatttgttcattcattcacttattcagcaaatatctatggagaaccaatataccattcaaggtttctggcatgggaaaacaacagtgaacacaacagatcatcatggaacttacgttcaggggtgacagacagtaagcagacaggtaaaatatacaacttcctgggcagtgataagggctttgaagcagaatgattgaattgagtggcacctacaaatgagaaaatgtctttttaagaggcagaggataaaactatatgtacagtatgatcccgtttttgaaaagaggaaatagtacgtatgtgcttgaaacatacaaacatggaaagaaatacctcgaaatgccaggggaggtggttatctctgaggagtagcattatgggtaatttttgttttcttaaatagacacctgcctgaattaatttctataatgagcaagtattgattctataattggagtaacactttttttttttaagcaagagacttgacatgagcaacatatctaatgggctgagccttgtgagttggagtcccagagccctgctggccagtgtgagggaatctgaggcagtgttaaactatggacttgccttctgtcacccagctctcagtgctcactcccaggtgggaccagacagaatttaggccctcgactgaaaacagaggccagaagctgggacagggggctctgtatacaagcaagtgcagcctgcaatggagcagcatagtggttaggaacaaggactctgcagctgcaggccagggtcccaggcctggctccttaacctggctgtgtgactttgagcaaattacttgaccttgtgtgcctcagtttccacataaaaagatgatagtagtacttacctcctaggactgttgcgatgaacttagttaaaaatttcaggccgggcacagtggctcacgcctgtaatcccaacactttgggagaccgaggtgagcaaataacttgaggccaggagttcaagaccagcccggtcaacactgctgacttcagaggagacacctcctaccctgggggtgggtacaagctcaaaccaccgagttgtttcagcccaagctcgcttcttgaggcctccctctgggatatgctccctcttctgagccttggattcagatagacctggatttgcttcttggttccaccatttgccatctaggtgatcttccttgggcaagtgacctgcccttggttctcactttctttagatctgtgaattgggcagagtgccacctggccacagttgtgaggattaaatgtaccagcattgcactgcctggtacctagcgggtattcagtagatggttgccactccacttgcctcctcccaccacaggcttcccaaatcacttcctggccttccaaaccttctgccctgcctcagcgagtgcttccttcacccctgggggttcccatggccctgacccccagacatcttccccgcccattcctctctatgctgttcacttttggtgaccacatgtcaataaccagtggtgaggctggggtaccctttggagccacagcctctatggtgcgggacatcattgctatggcaacaagaggcagcagccctgaagaggtgcctgctgagccgggctgcctgggtcccagctctggctccggatgcactagttgtaggatcagctcaaatcactcaatgtctctgtgtctcaccttcctttttgtacagtgaggagagtaatagtgcctaccttgtaagcttgtgaggataagatggccacacagatgtaaggcacatagagcttggtgcacggtgagcgtacaatcagggttagtgattacttttgctcttcttgtcatcctaggattcatgctgatagccatagcagatacccttctctttggggttcaaccctcaatgccctgtgccatccccacattgtgtcagctgcccttggtcccctctgatgacctactcctccagggattttcttgtggagatgaccgtccacagccccgtcctttcgctcccatgcctatctaaagaattatgtcctcctgtagtgatgacaagagtgagcagcagaaaatgctctttttgcagtcttgaaatttagtcagccccaaaagaaaccaggaaattgcgtcagacactgaaagagaaacaagctagagaaaaaccattgcttgttgcaaaccaaaatttgtgatttcagttcagttcaacacaagcaccaaaccaccaggtttgctacacaataagtgtcaattttgcttcttgcccttttggatgcagtgacatttttgacaagttgagctttctagcccgaactttctaaatgtgatcctgatgacctttgccagtgaagtacggtggtgaatcagtgatgtgattgtggtacagaccatcggtctgggctgcacctgttgtgagaaatcggttggggatgaaaagaacatggcctggcttgaataacaagcagagaatgttctggccccatcacgagccaagaatctggaacctgaatccctacatcacagccacaccctggtagtctgcctggagagcctgaatggcaccctccgggggcatttgatgagtacattctaccaagtgtaaagatgttctgagggcagcctccaaaagtcacctcttctcctggtcacaagggaccttgtgctgggtccctaattgatgtttggcaaaaacacagcatggttctctcctaaaggcctacagaccagtgaaggaaggagatgggctttttaaatgcaagagtgtcatggagctgtcacagaggatggcaggatgagcccaggaaccattcattcacccagtgttgaaggtggcatttcaaccaatggggaaaaagtgagctgtccagaagataggttaatacaatcgattgactgattggatacaatcagaaccctactatttgccctagttcatgccatctacaaaaataaatcccaggctgggcgcagtggctcacacctataattccagcattttgggaggccgaggcgggtgaatcacctgaggtcaggagtttgagatcagcctggccaacgtggtgaaatcctatctctactaaaatacaaaaaaaatagctgggcctggtggtgggtgcctgtaatccgagctacttgggaggctgaggtgggagaattacttgaacctgggaggcagaggttgcagtgagccgagatcatgccattaaactccagcctgggcaacaagagtgaagctccgtctcaaaaaataataacaataataatacaaaaataaatcccagatgactaaagaactaaaaattgtatgtatatttttaaaggaagcaaatatttatttttaatgtaggggactattttacttatttatgaattaggttctcacttcgtcacccaggctggagtgcagtggcccaatcacagcttactgcaacctctaactcctaggctcaggtgatcctccagcctcggcctcctgagtagctgggactacaggtgcataccaccatgcctggccaatttttaaaaattttttttttttgtagagatgcgggtctcactatgttgcccaggctggtctcgaacccttggcttcaagtaatcctcctgcctgtcttggcctcccaaagcactgagattacacctattgcctcttttctttttttttttttttttaagtaattttgagatagaaaacaagacacaaaacccagaaactataaaaaatgatgcatagatttgactgtataaaaacttttaactttagtcaaacaaaagactaaaaataaaggcaaatgagagatggagagaatatatttgcaatgtctataagagactaagtaagttagtatttagaatataaagagttctttgaatccataataaaaatggaagcaatagaaaattaggccaagaacgtgaaaaggcagtagccaataaacatatgaaaagatatccaatccactagtaattaaggaaatgaaaatttaaatagtacgatactatttccattctttttaaatactgttaatctgtgttggcaagattccctgtggagggagacaggtatctcttttggataacattttggtaataaacaacaaaatcttaaacgtgcatatgctttcactcagtaatttcacttctaggagtctatcagaaatattcatacagagaccaggcacggtggctcacgcctgtaatctcaacactttgggaggcggaggcgggcggatcacgaggtcaggagatcgagaccatcctggccaacacggtgaaaccccatctctactacaaatacaaaaaaattagccgggcgtggtggtgcatgcttgtagtcccagctacacgggaggctgaggcaggagaatggtgtgaacccggcaggcagagcttgcagtgagcggagcttgtgccactgcactccagcctgggcgactgggagagactccatctcaaaagaaaaaagaaagaaatattcatacagatacaaagaagtacatctaattctttgcagcgctgtttgtattaatgaaaaactggagatgtgctaaatgcccaccaataaaagattaagtaggtcattctccaccagaggcaattttgccccccaggggacctacagcaatgtctggagacatttttggttgttgtaagtgggcagtgggtaaaggctggcatctcgtaggtaaaggccaggatgctgtgataagaccacctataggacagccacctacaacaaagaattatccagccccgaatgtcagtaatgccaaggttgagaaaccctgggttaaataaagccactgccatactggggaatactatatagccaatgaaaagaaaaaggtaaaattatatttgtatgacattaaagatctctaagatgtatcattttaaaactgcttttttgaaacttaatatgtgattcttacaatataagaaaacaaaacaagtggattttaaaactactaaatatcacttcccctccccagaggcaagtgctgttaccagcttcttatgtgtccttccagaattacccccagcatggacaaacatagaatctggttttcggtatgctgcaaacaggtgactctgctgtgcagttacattcagaaaccagtggtgcatcattgagctgcccaaggcctggagctcaggaccccggacatatttcctagattattctccctcccttgggtttctatggcattttcatttatagatacaaaacaaaactatgtgctggggggaataggagcatgggcaggactctggagcaagattctgatgttggtgagtgagacaggacctagaggaagccatggggcaggtttctcagccagtgggtgtcaatgagattgcacaaaggctattagatgatgatgactttaacagggaggcacgggtgaatctccttacactcagtgcaaaattcagccaaagttgggagcataccacattcctcttcctgtctgccactgccaagcagtcatttatgggcccactaacatttacaaatgcaggttccaggcactgcatcctcatctgcatctctgactttctgaacaagcctggctttcatctcctggggatttcctggaaagcctcttagagttgggtctgaggcttttgatgttagctttcatcagttacttctcctgctcctgctttctctcactgaagtatcattccaaggtcagatgcagggacagtggggttgggtgacctaccagcatccagtccagggcttccaaaaggaaaggtgtctggtgccatctttagccagacacaggcacactcagtggaccagacttggcagaggcacgagggctcaggtctgctgaggaaatgttcccaagcatgggtggcaggagacagggtcctgagaccaccagacacctccccagcccaatcagaagccgacgtctcttgaaaactgcctcttgagttttctgtagagatttttcatcgtagacctcaaaatctcatttctttctggaaggatgctcagccaggctgagaacctgggcaaactttctggcacctggctggttgcgggtgtacactcaagctgcaaccagactagtttggttccagagtcctcaggggaccatcacttttctcagatcatgtcagcttccttcatctcttgtgaaatttaaaccctctgctccttccaaaaaatcatgtcttctttctagtaagaattctgacagaatggagtcagaaaggacacaggttccagggagtgatgtttcttatctggaattctaattccagtgattctgtggtatcatggctggtctgtgggacccttgctttgagttgagggctcttgcagtgttacttttaaacccctggacatggctgggcaccgtggctcacacctgtaatcccagcactttgggaggctgagacgggtggatcacttgaggtcaggagttcgagaccagcctgaccaatatggtgaaaccctgtctctactaaaaatataaaaaatagccggccgtggtggtgcacacctgtagtcccagctactcaggaagctgaggcaggagaatcgcttgaacccagaaggcagaggttgcagtgagctgagatagcgccactgcactcctgcctagcgacagagcgagactccatctcaaaaaaataaaataaataaaataaacccctggacatttatgttagatattttatttttatgacagttcaatataaaagaacaaaccgttacgagaggagctagaaggcaccttaagaggcaagtgaaccctttggacagcatcactttgaagttactctacacagaaacatctgtcttccaggagcctcccagctgcttcactccgtcctgaagtcagaacccctacctccagtcctctctgaattcaggcgtgtttgtgcatttgcttttctaactgggaacacgaagacacctgagagggttggagctggcgggaggagggcagggataaacaccccagcgccttttccccactattgtcttgttctttcttccacttcacctttgctttcttttttaacttgtatattaagttcaggggtacttgtgtaggtttcttatatggtaaacttgtgtcatgggagggggttgttgtacagattattttgtcacccaggaattaagcttctaaataattcagggggccccagcatttgcagaagttacctactggctttagaagaatttctgaaaagtttgatgtcagtcaaatcttttttttttttttaacttaatatgctggctaagatgctggctatttaaagttggaatgaatgaatccctgggcaaaaaggaagcttttaggagcacgcataagcacacaccatactctggctaaattagattttctaaaattgggctttcctaaagaaagtcatatggtagatggccataggcccagtgaaccgaattcagaaagtgttatttcatgagcaagtttcccagaaaggttcgagatgtttctgatagagcaggaatgtacttcctactacacagtactcagccctggaggctcagagcaggaagacctgacctgcacaggccccttttgttggctgggaaacttccacatccctgtgtcaccatgaaaaagagctaactttgtcttcaacgacgagttggaaaattattttaatctctgcattaaactagatgcaaaattgcctctctacctaggaatcacgctgcataatcccacattatctgcattttcagtcatgccttgaataatgatacttgagttcttgaggaggtcattgtggggctgggaagacccctagacttccccatgtagatgtggcctggaagtaagactaacgtagcagcaaagccctggcgatcatgcacactcctgagtaaggcagaggtgtgaatcattatatcaccatggctggctagcttcagaggaaccgaaaaaatgaaaacacttgcgttgctcattagcaaagggaaatacacaaatgttgagggactctttgtgtcacagccacactcttctgtttcgatctggtaagcagagcactctccatacctgcttcaagcttccagctgagagttctcttttagctgttgtacctattgctgaggatcttgatagtgggctagcaacaaggggctttagaaaataagagcatttcagcatcaactgttttaactggagttagatccattttgtgatttgatttgatttttatttttttagagacagactttcactctgtcttgcaggctggagtgcagtgacgtgataatagctcactgcaacctcaacctcctaggctcaattgatcctcccacctcagcctcctaagttgctgagaccacaggtgcatgccaccacgcccagctagtttttgtattttttgtagagacagggtcttgcttgttgcccaggctggtctcaaactcctggcttcaggtgatccacccgccttggcctcccaaagtgctgggattgcaggcgtgagcctgggatgccaggcatgcaccaggccccattttgtgatttaattctcattgtagactgacattttctatagcagaatttttcaacagtagtactgtagttgaggggccacatttggggctggagatgggtaactctttactatgggagctctcctatttattgcagggtgcttagcagcaccctgggcctctacccactaaatgccagtagcaacccccatccccgcaaattgtgtaaaccaaaaatatatacacacattgccaaatgtcccataggacacaaaatcatatacccatacgctaacacacccatacactaacaccacacgcatacacacacacacacacacacactttaagactcgctgctctggccaggcgtggtggctcacacctgtaatcacagcactttggggagctggggcaggcagattacttgagttcaggagtttaagaccagtctggccaacatggtggaaccccctctctactaaaaatgcaaaaattagctgggcatggtggtgcatacctgtagtcccagctactctggaggctgaggcaagagaatcgcttgaatctcgtaggcagagttgcagtgagccaagatcatgctactgcactccagcctgggcaacagagtgagactccatctcaaaaaaaaaagaatcacccctccataggagagaggcagtgtataaaataatcttttttctaaattggttgtgcattttaaatagattcctggctggaaacaatggcttacgtccataatcccagcactttgggaggccaaggcagggggattgcttgagctcaggagtttgaaaccagcctgggccacatggcaaaaccccgtctctactacaaatatgaaaattagccaggcatgatggcacacgcctgtaatcctagctacttgagaagctaaggtgggaggatgacttgagcccaggaagcagaggttgcagtgagctgagattggttcactgcactcctgcctggggaacagagccagactctatctcagaaaaacaaaaactaaataactaaataaataagtagattctaagattttacacacattgaatcccgtgtgttactggtttgttccctacatggagtagacaggttttctctttggccttcacggaagctcagactgttactcattctactttcttgtactcatgcattgctaatagttttcatctggttattaattcagtagcaggccgttaagcatgttcactcgtgctgagatatttcttagtgagctctcaccacatgccctgatggtgagcagcctcacctcttaaacaggattcctgcatggttgagaacccgtccacctttctcggcttgttatgatcagagcttacacttttgggaggtagaactgcatctgacatggaggaacatggtccttagagtcagacagacctggattcaaatcccacttctgcttacaagccagatagccttggactgatgattgaacctgcatgcctccgtttccccttatgaacatggggatgattttgtctacctggcagggttctgcatggccttagcgagatcacgtatgtcagacatcagtaaatggtaacttgttatctgtcagttgatagctgtaaggtatgaattaccatctttgtaggtcaaaaaccatcaaatattggcaacttcgtacaattgggcctaatatgtaaaccccaggtcaccatcacgctgtcctctttgctctatggatatccagcagatgaaagggatggttctgctttgttattttcttgttttcctgcttcttctgagggggcttcccgctggcacaatctaacaaacttcagagaggacgaagtcagtctctgctgtcatcagtgttcacagacagtagtttcaaagtgtgtaccacatgaagttgcagtcttccaaccttccagccagtgtgtatggaaataacctgaattgtattaatagcagttcttcaatgtgggcctgctgggggatgcttggttgttttccgttgtttgttccctgggtgcccgtcttgggcaagcatttctctgatgtctctatttatgtggcaggtcaccctgctgattgccttcatctgtgtgcggagctccctgtggaccaactacagcgcctacagctactttgaagtggtcaccatttgcgacttgataatgatcctcgccttttacctggtccacctcttccgcttctaccgcgtgctcacctgtatcagctggcccctgtcggtaagagagtggtctggccctgtcctccgcatgcacaagtcaggatgttagctagagtactgagacctgacagagtttttcccgtctgcccatctcacctctttaaccattctttgctgcctctgccctgaatttcctattgtttggtggacatctctgcttgatgtcctgctggtttttaaaactcactttccagctacaagaaggctgtggctggccgggcgcggtggctcacgctggtaatcccagcactttgggaggctgaggcgggcggatcacgaggtcaggagttcgagaccacggtgaaaccccgtctctactaaaaaatacaaaaaatcagccgggcgtggtggcgggtgcctgtagtcccagctactcagagaggctgaggcaggagaatggcgtgaacccgggaggcggagcttgcagtgagccgagatcgagccactgcactccagcctgggtgacagagcgagactcctctcaaaaaaaaaaaaaaaaaaaaaagaagaaggctgtggctattgccccatgcttactttctcaagcaacagagaatggctgtgtgtgtatgagttgggaaaaggaacacggaaggaaattgtaggtgaagatgatgggtattgatgctgttgtgaggattgaatgataggattttctggctaaaagagactagtgggggctgaggagacagtcagaagttgccagactttttcttcccactgtattattttttaaagcttcattgagatgcagttcatatgccgtattgttcacccatttcaagggtacaattcaatggagtttagtatatttccagagttgtccaaccattactacagtcaacttgagaacattttcatcatttcagaaagaaattccataccttttagctgtcacctccctaccactcatccctccagtcctaagcaatcactaatcttctgtctctaaaatttttctactctgaacgtctcatgtaaatggaattgtatatgtggtcttttgtaactggcatctttcacttagctgaatgttttcatggttcatccatgttgtagcaggtatcagtatttcattcctttttttctttttagagacagggtctcactctgtcacccaggctagagtgcagtgacgtgatcgcgactcactgcagcctcaacctcccaggctcaggtgatcttcccacctcagcctcccgagtagctgagactacaggtgcatgccaccacacctggataatttttgtgtttttttttttacagagatgaggtttcattgtgttgcccaggctggtttcaaactcctggccttaagcaatcctcccactttggcctcccaaagtgctgggattacagacatgagccaccatgccagcctttttataaccaaatattattccattgtgtggatagaccagactgcattttgtttttcattcatcttcagtggacctttgggttgtttttaccttttggctattatgaataatgctgctatgagcattcatatacaagttttttgtgtggacatattttcatttttctctggtatgtatctaggaggggaattactgagtcatatggtcactttgtgtttaattgtttgaggaaccgccagactgtatgccaaagtggctcactgttttacattcccaccaggagtgtatgaaggttccagtttcacaacatctttgccaacacttattatctgactttctgattccagccattctagtgagtgtaaagtgttatttcctgtggttttgattttcatttctccagtgactaatgatgttaatcatcttttcatgtgcttttggccatttgtatattttctttgaagaaatgtctattcgagtcctttgcctattttttaattaggttatttgtcttttcattattgagttgtgagaattccttctatagtctggataaaagtcccttatcagctatatgacttgaaaatattttctcccattctgatgtttttcacttttttgatggtgtcctttaaagcacaagtttttaattttgataaatttagtttatttattttttttcttttttagctcacgcttttcttacatataagaagccatttccaaattcagattgtgaaaatttacttctatgttttcttccaagagttttatagttttagtttatacatttaggtatttgatccattttgagttaatgttttttgcatagggtgtgaggtaagggttcaatttcattctattgcatgtagatatccaattatcccagcatcatatgttgaaaagactattctttcccccattgaatggcattggcacccttgttgaaatcagttgaccattaaatacatggatttagttctggactctcaattctattccattgatctatgtgtctgtcgttatgccattatcacactattttgattactgtagccttgtagtaagttgtaaaactagcaaatatgcagcctcccaattattcttcttttttaggattgatttggatcgttacaattccatgtgaattttagaatcgggttttcaatttctacaaaaatcagctgggattataataggaattatgttgaatccatagatcaatttggagaatattgctatcctaataatattgtcttatccatgaacatgggaagtttttccatttttttagataatctgttatttctttcaatgttttgtagttttcagagtaaaagtgttttttgtttgttgctttgtttgaaacaggttcttgctctgttacccaggctggagtgcagtggcaagatcatagctccctgcatcctcaaactcctgggctcaagcaatcctcttgcctcagcctcccaaaatgctgggactacaggcatgagccactgtgcctggcctgaactttttaaattaaatttgtgtctgagcattttattctttttgatgctattttaaatcaatttttttcttaattttatttccagattgttcattgcaagtgcataggaatccaattactttttgcatattgatttgtgtcctcaactgtgctgaactacttagtagttctaatatatttttctaatatatttttagtggattccataggatattctgtaaacatgatctgcaaatagagatatttttacttcttcctttataatctggatgccatttatttcattgtcttgccttattgcaagaaattagttgactaaattagacaaatattgaatagaaatggcagagcagccatcattatctttttcctcatgttaggaggaaagcattccttctttcatcattaaatataacattgggtgtgagtgttttgtagaagccctttatcaagttgaagttcccttctagcattactttgttgagtgtttttatcataaaagagtattagattttgtcaaatgctttttccgtatctactgaggtgatgagtttttctcccattattagtatggtgtcttacattgttttttgttttttttgttttgtttttttagacaggatcttggtctatcatccaggctggagtgcagtggtataattatggctcactgcagcctttatttctcaggctcaagcgatcctcccacctcagcctcttgagtagctgggaccacaagtgtgcaccaccatgcctggctaattttttttttgtttttggtagagataaggtctccctatgttgcccaggctggtcttgaactcttgggctcaagtgatcctccttcctcggcctctgaaagtgtggcgattacaggcatgagcccccacacctggcctggtttgtttgtatatgttgggccaaccttgcattcctggggtaaattccatttggccataatgtataacccattttatatgctggtatattcagtttgctaatattttgttgaggattttttgcatctgtatttaaaagagatattggtctgtagttctctttttttctgatgtccatctggttctggtatcaagttaatactggcctcacagaataatttaggaaatattccctccttttttatcttttgaaagagtttgtgcagaattggtattaattattccttaactatttggtagaatttagcagtgacaccatctgggtctcagcttttcttgtgggtaattttttttattgttaattcgaactctaattttaccatcttttcagattgcatcatttattctggagtcaattttagtagtatatatgtctaggaatttgtccatttcatctaagtcattgaatttattggcatgcaattgtttattgtatttcttacattctttttatttctgtaagtgcagtagtaatgtttcctctttcgtttgcatcttctctctctctttctctttgatcaatctagctgaagatttgtcaatcttgttgatcttttcaagaaccagcttttggtttcattgatttttttattgttttcctattatcttaataaatgttgctttaatctttattttttttctttcctcttcttgccttaggtttagtttgatcttcttttcctagtgtcttaatgtataatatagtttggatatctgtcccctccaaatctcatgttaaaatttgattcccagtgttggaggtggggcctagtgggaggtgtttggatcatgggggcagatcccttgtgaatgacttggtgctgttctagtggtaataagtgagttcttgctctgttagttcccatgagaactgattattaaagagaggctggcaccttcctcccctctctcttgcttccttcctcttggctgtgtgatgcctgctcaccttcacctttgcttcagaaagtagaagctccctgaagccctcaccagaagcagatacaggtgccatgcttcttgtacagcctacagaaccatgaggcaaataaacctcttttctttatttgttgcccagccttgggtattcctttattaaaacaacgcaaaacagactaagatgatgtggaaggtcatcatctaatttgagaccttccttctcctttaatattggcatttacagctataaatctccctctgataactgttttacttgtattccataattttggtatattgtgtcttcattttcatacatctccaggtattttctgatttctcttatgattttttttctttgatccattcattatttaggaatatgttgtttaatctctatatatttccctgatttccctctgctcttgatttctaatttgattccattgtgttcagagaacatattttgtagtccttcttacctttattgaagtttgttttatggtctgatatatcgtctatcctggacaatgttctgtgtacatctgagaagaatgtacttttatacattgtatatttgtatattatacttttgctggatagagtttttatagaggatttttaggtctagtcattttatggtgttgtttgaatcttctatttccttgttgaccttctacctggttgttctatacattgctgaaagtagggatattgaattctccaactattatttttgaattgtctgtttttctccttcatttttctcatttttcacttcatgtgttttggctcttttattaggtgcatatacgtttataattgttatatcttacttacagattcagcttttcattgttataaaatgtccctctttatttctagtaacttttttttgtgttcgattctattttgtctgatgcagtgtagacaccctggctttcttttggttgttgtttgcgtgccatttccttatctttgaatataaagtctctctcccatagacagcacatactgtagttatttctcgttttgctttggttttttaatccaatctgaccacctctgcatcttgattagattgtttaattgttcacacttaacactattacccactgttattttgagagaaatttcttttgtgtttctaagttctaaggcccctttcaaagttatggcatttttttctgcttcttttgagaacaaattcctctggggcttacctgatgcagatactgaacaagcaaaggagagaacaaaagctcagggacaagcacaagagtgggctgcatgaggagtgaaagttggaaggacagactcagccacacatttttggctgagatactatttaagtacttccggttaggattctctcaagttggttttctctgccccatgtcatcctcctctgtcttaatagttgagaatcttggaggtggggaacttgcagttactcatctgttcttcagttaaaatctctgtgatctatcttgtgatattcctttctagtcactaagggagaaaccagggtctttgattttacatagctttgagaggagctacagctttaaattggaatgcttttccaaaatttaatagctgcctgccctaaggggcagaacttcatgaaggaatgatttctagattctcattgaagacaactgaaaatggatgcaccctggattcagagcaagcactggaagtggcccccagcctcagttcttctcggatctgatgtttaatggggaagagaaagggtgagatggaagctttccctcgccactgaaaggcccatctcatccagggcctgcaaggatgctgattaatcatgatgagtgagtggggtggaaatgcatggcccatgggccaaggcgagaagcaaaggtggaaccagtcctgccagtggattcattggcagagcttggccgggagggcactcttctggagaaaagagaagagggaatgacaggaaaaaaaaaaaaaaaggcaggaaggctcaggagtgagaaagccagctgccaccacacatccacaggcacttcacagaagtgccactgacctcattctagagtctgagtctgacgggaccctgggaatgaatacctctcaagtccacacttggggccattcacagagtgggctgacactcccatcagtcacacaagaccagcacattgttagcccagaactttctccgaagcagaagagaaaggcaaatatctctttaaggtactttgcttctccgagctggagctttgtttaaactctccagccgggaagttgcaagaagctcgtttgctttttagtagctttagccagaggttaaggcactgtccacagattgctctcaggagtagaggagtccttagtggctatctctgctcacaccagaagcttcctttctctctgtcctcttcccttcctgcctgcccggcatcacttctgtcttgcttggcctcttcctggtcagcccgcatgttggctgcctgcgagcggctctgctcatcccatttgcgtgttgcaagggagaagaggaagcgtcactctctccctttcttttcatgtcttctgatgcccagttgctcttcccggaccagaaatggacggccctacccacttatttgctttgtttctgcccccaggaacttctgcactatttaatcggtaccctgctcctcctcatcgcctccattgtggcagcttccaagagttacaaccagagcggactggtagccggagcggtgaggatgttttggggagcctttaggaatgaattcttatttaaaatgctcattttcttcctgatgggggaagagaagggcttggtttctggggcattcccttcatagaatcaatacctaccttgatccagccatcagctctctccaaagagccttaagcagaggcgtacagtcccagaaggtggattgtcagggctgccagcaaattcatagaccccagcagcccaggcctctctctcttacaggcactactgaaatcagggggccaggcgggttttaattcacacacccactctgatcatttgctcgttggctgcctcagcactatgcagagacagatgctggagcctcttttgggcccagtgggaaatgtactgtgatcaattagagatacatgccatgagcctgagctttgccattcctgatttttaacagtattcaggccaggaaataatactcctgtatctttcagaggcaaaaattgatccatctgatagccataaatagaagtagatggaaatatacaaaaatacagtcctgtgagatatatacatacatatatatgtatatacatacagatgtatatgctatttttttaaagattcatagattcctgtcatctgatttctgatttagctaactatttatagttcagtggcctgtgggccaacactgatttgcttcactgatgagcagacaagattttaaaaatgagttttgagaaaagctctctcaagccagatgtggtagctagcatgcacctgtagtcccaggcactcggcaggaatgcttgtgcccaggagttcggtctggcctgggcaacgtactgagaccctgtgtcttaaaaaaagaaaaagagaaaaagaaaagctctctctgtatgtgacattcattgtctttcacttacgtatattaccaaaattttccagactttggcctgggagtgggttggctcctggaattccactgagggatggagtctctcctctgaaggtcagcatgggggcagaaggtcactgtagagggtggccaaacctcccaacactgatgctccacatggccctcccacagcccaccatcacacctctctgccccctctctctgctgtctctgaagagagggatggttgccccctgaagcttaacacctgcccagctacagtgcagggtactggaagaggcacacaggagacctgtgcccactgtgtttccgggcccacttgaggagattcccactgtgtttagtaattcaggttgcacataactgtttagccctggaatctctatagctaacattcatcatatgctgtctgtgtgcctaggaccaaacctgggctatgaggaagttagaagaaatttttaaaatatggtccctgcttataagaaagtggtcatctagcttaggagacaagacacatgaaacaattagtaaacaaggcgttgtagtctagaatagcattctgtagcgatataataaactgttcaattatgcagtgcagacagttggggaccgggatggtatataacgtgctaattgtgcagaacagacaatgagaggccgggacaggctctaataggctaattatgtgctgtagacaattggtacaaaaggagcccaggaaaagaaacccggggaagaagtggatgtgggctggtgggggcagctgtttatgtaaagcagcatctgggcttgaaaagaaaaccaaaccttgttgaaaatcctacccttagctgcccctgcgccattctcactggacaccagtggcggtgtagtgaagtggaggcctttgtgtgggtctgagaacacctaggcacccggtactgcagagtgcggactctggagccaggctccctgggctcccatcccatatctggcccttgctggctctgtggccttcggcaaaacagatgaccgcctgtacctctgtttctttagctgtgaaatggaggagcagggtgggtaatcctagcacccacccagcagagttgtgagggttaaaggaatcaatacacccacagggcctcacaccctggtagggatgtagtaaagtggtcagtaagttttcaccactgcagctgccggtgttgttcacaagcaaggaaaatggctgcaggcttcaaagcccagagattccagaagaagctactgcctcttcctcgaccatttgatgagcctcccacaggcactcttcgtctcccagcacccgaatctcatctacaagtgagggggctgggctaggtcagccttcctcacacttgagcgctggatgaccctgagaaagggaaagggtgctgccttgacttagttgagtctaatattgtttaatatgtacaaacgtaaacctagatgtaaaggcctcggcttctggctctaatacggctatgaagccagaatggaacagaaagtcattacaaatgaaatgcgaacaacgccactacaccacaaatcatgggaacgttcagatttttttaacccaaattaaaatttcatccttttcttctcttttggtccaggataatcaaagtccattggcttagccccagcttgcttgtaaatgtaaacccagaccaggcactgaagctgccaagagtgaagaccgagaggcctggctgccagccctgacctggcccaacctgggggactggggccagtggctgggcctcgcggggcttcctctctgcacctgatccaggatgaggtggttgggttagatgactctccaagctcctttctggccagagacatgaagggaacaagcacagagatgagaagcagacaggattgcccgagtaattagccctatggcctgtgaacttcctctcccctctctccactgcagatctttggtttcatggccaccttcctctgcatggcaagcatatggctgtcctataagatctcgtgtgtaacccagtccacaggtgagttctggttatctgtgcacagaggatctctcaggaacagggggatggcttgttcttgacttcagccatagggacaaaccctgctgttgagaaggctgtgttccaaggggactttagaagtagtattagagcacaggggccagcaaaggggaagatgtgaccccagaatctcccctcacattcccatctccacacatccaaggatgccctaacatttcagcctcgggtggccaagcttttttctctttcttgcttcctttctttctttttctttacttttctttttttttttttgagattgggttttgccctgttgtccaggctggtgcagtggtacgatcagagctcactgcagcctccgcctcccaggctcaagtgatcctccaacctcagcctcctgagtacctgggactacaggtgtgcaccaccatgcctaatttcaattttttttttttttttttttttttttttttagaggtggagtctcaccatgttgcccaggctggtctcaaactcctgggctcaagcagtcctcccacctcagcctctgaaagtgctgggattatagacatgaaccaccgcacccagccagctttttcttaagtttcctaatgacaaaaataaaatgtaggtttttagaaaatacagataaaaaatatgtttaatagaaaccgtctgaaccagggacagtggtgtgtacccatagtaccagctactcaggtggctgaggcaagaggatcacctgagcccaggagtttgagaccaatctgagcaacatagtcagactccgtctcttaaaaaataaaataaaataagaaaaagccatctgtcatcacactacccagaagtagcactgagtatcctttcgatattttctctctcaaaatatatatatctgttgcttttattaaaaggatcaaacttcatgtgctgtttcataatatgttttttctcctacttagccactgaccaaacattttcccaacatcattaggaattcttagcaactccgtgggttgcagcattaagtccatcgcatgactgtgcagtttatttaacttgcctcctctttgagggcattactcatggaatcctacactgagcccatgtagtgtaggattccactaataagaatcgtctagagcaggcagattcatagagacacaaggtagacccatggcggcctggggctgctgggagaggactcaggtgtgactgctaatgaggatgaggcttctttttgaggtgatgaaaaggctctaaaattgtggttgcacagtcctgtgaatatactgaaaaacactttagatgggagaattgtatggtatgtgaattattaaaatatcccagtaaagctgtttaagaaaaaaaagaatgatttttaaacgtagagaatataggggaaaagagaagttaataggtggtgtctaacaggataaatctataaatattggtataaattggttttttgaattatggaagaatcaccaaaagaaatggctaaaaggcttgggaggttgctgctgaggagtaagactgaggtcgggggagtgcggatgggagtcacctctgcactaccgaagttttttccttgtttggaaatgtatttttaaaaaatggaataatctcagtgcaagtcggcactgggtggaggacacaggtgcccccctgagcagaacttggagtcaaacctgtggagtgtggcttgtgggtgggccacatccctggcaagctgtcctgactgccatttccttcccaagatgcagccgtctgatgaggccacaacccctaggcccctcaggagctttgcagagaggaggacgtgtactccaggcgaggcctctggacctgtgttcctgtgccaaagtcctgtcaggctggtgggcaccaggaaaggcctgcaccctcttcctgctctcccaggaagccagctccctgagctcctgagccagccggaaactcttcctccagccttccggggagaacatccctcccattctgggaaaggaaagcagcctccagggaaatgttttctgccttcctgcttctagaaccacctcaggtactgatgaaccccacttagcacagctgaaggggtttgtgaatactcccgcctaaatcccttctacttcactcctcaggggagtgaagtgccttaagaaacaaagccctgtcctaatttatctagcttgtcagtccggtcttagagataccctctttcctgaagtgaggcgtgcctgtagaaacactatgtggtcagcctgtccccaaggagatcttgtgtctcctctccatctctgcctttgttaccagtgtgcatgtgtttgtgtgttttttaataaaatattgactcggccagttgcacaaggatttcttattgaaccagatgaaggctgtaaaacctggcctgaaacagtttccattcgagcttgtgtctggcccatggccctccacccgtgctctgtgtgtgccccttgctgaactgctggacttcaggttttctctccatcttgggggatagtatagcagggcagagttttaggtaaacatgtgcaggttctcaattatattcacgtcctccttctcctgcaataccaatcttctcattttggaaagagctttagagcaagctaagggttgtgtttacactatgatgattaatgatctcggcctaaatgtgctgtttcgctgatcttgagctgctcagttggctagaaaaaggagggatggaacaatgtttgagcaaccccgtgtgcaaggacctacattcacaaccacatctaatagcgatggtagtgactgcaagggggcaggttataggaccacatttttagaaatgaaatcggggctccatccccaggcacagggcaagccagtgaggagctgggctcaggatctaggtctgcctgactcccagccccatccttgcctctgctgagtgttgccggaaatggaagcagcccctgtgggctttgagctggagctctggggctactcttgtggctgctggccagctcggggcatcgggttctgtctgggatgatctaaggaagcagcacccgtggtgtatctggagccgagtgctgctgatgggaggggatcctgtgtaccagctgggctggagcgggaacacggctgagctgaccctggcacagtcggctcctccagggcaatggaatggaggagtctcagctgaggagggcacggtccaggtgaggcattgggtctgggagccccctgcctgtgtagtgacaatgcaggcctcgccaagcaacgaggatccgggtttgaccatttgagcctccccctaggagggcaaaggtgggtggaggacagttggaggaatagtagcaggagccagagtctgctcagtgaggaaggaaagcaaaacgcagagccaagtgaggcctccacagacagcgagcagtggaccatgcagccagtggcttggctgaggggtggctgtttgagaccacagggcctttttagaaactggggtttctgtgacctcccaaaaactgtctggtaaaaccatcccttctaaatggccacatctccagcaccagggagtaaatgtttaagcaaagagctaaggatggtggaaagacagtcaggctgggagccgcagacgtggggttgagcccagctctgccgttgactagcccccgacttggcacgggtcatcttgctgaaccttagttccccctttgtataacggagagaataagcccatcctggcctgtctgtgacctccttggaattcagtaacagagcagcgtgcttacttatcgttatctttctaatcttaatccccagagaggtaccagaatgacaggaaatgagcaggttaatgttgcaaaagtgatcgaatcacctgggtgcaagggagctggagaacataatttactttcagtttcctggaccttaaattttgttaaagtcaagattggaagctgagggcagttttcagccgggcgctgggacccatggtggacagagggcatgatgaaacacctgtagggaactgggtgggtgaacgcatccccagcagccggctctgagctgagtcgtgggggtcctccctgccagaggcccactaacctcgtctaacctggtgaaggggacactggcttttcacttttgaagtatgacaatgaccttcagatcctctgcttctccagttcttttagccccagtggcgccccagccactcaggtacgttctagaagcagggccagcacctttgagccccagtcatcttggcaacctctgcacacagctggctctccattggcaattgaggatgctgttgacagtagggagaaggagaccctctggtttccctatggtgactcactcctcctggacacagcttcaaccctagggagtgaatatctaagccggggggcagtgccattcagctgccccatggaggaccagcccctaaacccaggcattaactcatcacagtgcagcacggcctggggaagccgaccagccttcctccaagaaattgagatgcaataggtctgaaatgagagccaggaattcctaagccttgtccacaaagtggatatcacctggcagctggttagaattgcaggatcccagccccacaaagaccaactaaaatagaatcatctgcatcataaccgagtcccagtggtgtgtgtgcattgcagtatttgtgagacactgttggaatcaaagatgctgtaaagtgggtgcaactctgaggctgatttcaccaaagggggaaggagatgagaaatggtgtcagttggcgggtttctgaagcaaaccctacttctcactggatccacagctgcattggaagaaagattccttttaagaagtagttaatgggccgggcgcggtggctcatgcccgtaatcctagcactttgcgaggcctaggtaggtggatcacctgaggtcaggagttccagaccagcctggccaacatggcgaaacctcttctctactaaatacaaaaaattagctgggcgtgatggcatatgcctgtaatcccagctacttgggaggctgaggcagaagaatcacttgaacccgggaggcggaggttgcagtgagccgagattgcggcgccatcgcactccagcctgggcaacaagagcaaaactccatctcaggaaaaaaaaaaaaaaaaaaaaagaagtagtagctaatggatgatggatgctgggcttagtacctaggtgatgggttaatctgtgcagcaaaccaccatggcacacgtttacctatgatgtgcatccttcacatggaccccggaacttaaaataaaagttgattaaaaaaatttaaaaagcacctccactgcctcctgtcttggcattttcgaattcctgacccttcccatattctggcttcagccctcagagacccttgcccctctgggcactgtggggacccagaggcagagcagagggtgtggggaacctcatagtccctggatcctgggagctttcgaggaaggctggccagagctctggggcctggggtgaggcacatacagccacactctagccccaggggacaggtgagaaaataacgtgctccactcccctcccactgaggccagatatcgcagagctttgtgaactaggaagagggagctcactggaaggagggtgactgtactcctgctgccccagggaggagcagctgcggaaatgaaggggctgcttcatgctacctgggggaacccctgagtttctgtgccccactggagttaagaagagtagagtttgaagaagatactgatctcgagatttccgtgttttgtactgtttgtacaatacgtaaagcactactcaaaagcaatacagacagccttaaagaggaaggaagttctgccacatggtatgatacagatgaaacccgaggacattatgccaagtgaaataagccagacatggacagacagatactgcgtgattccacttacaggaggtacctagggtggtcaaaatcacggagacaaaatctagaagggcggttgccagggccaggggaagggggaatgggagttattatttaatgggtacagtttcagtttgggaagatgaaaaattctggagatggatggccatggtggttctgcaacagtatgaatgaatgcacttaatgctactgaactgtacatctaaaaatagttaagatggtcaattttatttattttaccataatttttttttttcttgagacggagtcttgctctgtcacccaggctggagtgcagtggcgcgatctaggctcactgcaagctttgcctcccaggttcaagccattctcctgcctcagcctcctgagtagctgggactacaggcacctgccaccacgcccaactaattttttttgtatttttagtagagacggggtttcaccatgttagccaggatggtctcgatctcctgacctcgtgatccacgcgcctcggcttcccaaagtgctgggattacaggcgtgagccaccgcgcctggccaccataattttttaaaaagcaattcagggccaggttcagcagttcatgcctataatctcagcactttgcggggctgaggcaggcagatcacctgaggtcgggagttcaagaccagcctggccaacatggtgaaaccccatctgtactaaaaacacaaaaattaactgggcatggtggcgcacgcctgtagtcccagctactcaggaggctgaggcacgagaattccttgatcctgggaggtggaggttgcagtaagccaagatcacagcaccacactccagcctggacaacagagcaagattctgtctaaaaaaaaaaaaaaagaaaaaaaagaaaagaaaaagtcaattcaggacctatgtctaggcacctcagtagctgaaagagcaaaaattacaccaacccaaaatggcaacccacagcccaacagtggccaccccatgttctaacagctaagcattatgggtcctggagaacacagctgtagggtatgtttgtcttctctaatccaggctctctgggagctgttcaacccaggggccttgtggaacccaaactgtgtacccaccacccctgctcccagagcagttacagccaggtggatccaagcaaagatgtgagaggagggaaggatgcacccatgggggaggagcagggagccaggggagccatcctggcaacctgaggccccaggaaagggtgttggcaccggtggccgcaaggggcactgggagatgaggccgacggccatctgctcacatcccccaccacaaccagcccgttccctggccttgctcttggggaggtagggaggaaggctgagggggggtgccatcccttgggcacacctctgccaggttttctcattacccacaagagtggcagaaaactgttgctcagccaggctctggaagactacagcatctgtggggttttctgtaatagggaggcccgtggcaatagaacccccaatctttgaggacagtgtagcggggagaccggaggagaaagccaagtggaagggagattagtgatggagcccggtgaagacgcccaggcctggctgtcttctgggcgtggcctaggaccaccccactgcgggctgctgggatgacagggcagggccagagctggatgtctgcagacggacccagagggagaacaagtgtgttcctgaaggaggcccccttaaccccggcctgaggcaccccctgtgccactgccctgtgctgagctcagcctggcttccagccaggccactgaagaggccccaggtaggggaagacagacccagagctggcccattctctgggccacccacctgcaagcctctacactagcatgaaaagcaaacttctgttgccatggaaacacagcaggtctttggggcccctcctcagcaaccaccacttccctcctttgtggcagtttctgaactgcatcctgtgaactctcagaggtgcttcagactcacagatacccgattttatgagtaaaatatatgcaaacacttaaaacactctccagccttcaatagcaaacacggacactgggagcccctcggcctccatgccgtctgcccagggtaactcagctcgtgcagccgccgtcagtgcaaggccacccagagtgtgaagcaagctgctaaaaaccccgccaccacctcactgggcaagcctgggctcctccatcctgcgcaacccagatgcagcagcagaacaaatctgaccgtgaagctgcagctgcagttatctccttacttatccaaattgtgggctttccaaattaatcccattgttcctatgcactgactttataataagtaaatgttatcaatgtaaattagtcattgatattcataccatatttcccatttgacataatggagtttcatgcataatttagattgaaaagggggatttctctcctgaaaaaaaagtgtggaaactttcatgagtgtccgtgtgaagagaccaccaaacaggctttgtgtgagcaataaagcttttaatcacctgagtgcaggcgggctgagtccgaaaagagtcagcaaagggagataggggtggggccgttttataagatttgggtagttaaaggaaaattacagtcaaaggggggttgttctctgatgggcaggagtgggggtcacaaggtgctcagtaggggagcttttgagccaggatgagccaggagaaggaatttctcaagataatgtcatcagttaaggcaggaacaggccgttttcacttttgcggtggaatgtcatcagttaaggcaggaacaggccattttcacttttgtggtggaatgtcatcagttaaggcaggaactggccatctgggatatgatggcttagcttgggctcagaggcctgacattcctgtcttcttatattaataagaaaaataaaacgaaatagtggtaaagtgttgggatggcgaaaattttgggggatggtatggagagataatgggctgcttcgagcgggattaggggtggtgtggggacctagagtgggagagattaagctgaaggaagattttgtggtaaggggcgatattgtgggactgttagaagaaacatttgtcatttagaattattggtgatggcctggatacagttttgtatgaattggaaaactaaacagaataagagaaggagaaaaacaggtattaaaggtctaagaattgggaggacctaggacatttaattagagagtgcctaaagagattcagcatagtcctgccagcaaagattatttatttactttaagagttaagagtggcagtttggggatagcaccaggagatatcagctgtgatggcttggagaaacagtgtaaactgccagtgtaaacaagagcagggcatgtatgagtagttgagaacggtgaataggagtatgactagacagaacatagtagggatgacaagttttttggggcacagtctaagttggtctggtgtctggaatgagactggggcctaataaaaaggagcgtctaaacaggagcttaaatgggctgtactttgtagcattccgaggacaagcctgaattctgagaagggaaagtggtaaaagtatggtctagtcttttttaagttggtggctgagcttggtgaggtgtgtttttaaaagacctttagtccgtttacctttcctgaagactgaggactgtaagggagataaaggtttcactgaatactaagagcctgaaaaaatgcttggctgatttgactaataaaggccggtctgctatcggactgtatagaggtgggaaggctaaaccaaggaattatgtctgacagaaaggaagaaatgaccgcagtggccttctcagaccttgtaggaaaggcctctacatatccagtgaaagtgtctacctagactaagagatactttcgttttctgactcggggcatgtgagtaaagtcaacttgccagtcctgggcagggacaaatccttgagcttgatgtgtagggaagggagggggcctgaacaatccctgaggggtagtagaatagcagatggaacactgagaagtgatctccttgaggatagatttccaggatggaaaggaaatgagaggttctaagagacgggctagcggcttgtaacctacatggaagaggttatgaaatgacgacagaatagaatgggcctgtgaggctggaaggagatattttccttggtctaagaactatttgccttgtgtgggaagagattgataggtggaagtttcagcaggggagtaggtgggagtgactgaggggaaggagaaaaagtgaaagtgagggatataagttggaatgctagctgcttttttagctatcttatcagcataagcattgtcctgagcgatgggatctgatgccctttgatggcctttgcagtgaatgactctagcttcctttggaagtaaagcagctttgagaagcatttttattaaagaggcattaatgatagaggacatttgtgtagtgaggaaacctcttgcatggaggtgcaggatatggaaggcatatttagagtcagtataaatattgacatttagtccttttgcaggagtgagggcttgacttaaggcaatgagttcggcttgctgagaggtagtggagggggaaagagcggtagcctcaatgatagatgtggaagatactatagcatagcctgcctttgctggtgagtggagattaggcttggtggaactgccatcaataagctaagtgtgttcagggtgaggaacatgaaagaaagaaatgtggggaaatggggtgaacgtcaggtggatcagagagaggcagtcatgagggtcaggtgtggtatccggaataatgtgggagactcaacaaagagtgagtacagctgaaggagccgggaagcagacagtatatgtgtcaggtgtgaggaagaaaatagattttggaagttatgagaactgtagagagtgagttgagcatagtttgtgattttaagggcctctaaaagtattagggcagtggtagccgccatacgcagacttgagggctaggctaaaacagtaaggtcaagttgtttggataaaaaggctacagggtgcggtcctggtccttgtgtaagaattctgaccgcactaagcatgcctaggaaggaaaggagttgttgttttgtaagggattgaggtttgggagattagtcagatacgatcagcagggagagcacgtgtgtttttatgagaattatgcccagataggtaacagatggggatgaaatttgggcttgactgaagtaatgggacctgtctgtgaagccttgcggcagtacagcccaggtaatttgctgagcctaatgagtgtcagggtcagtccaagtgaaagcgaagagaggctgggatgaagggtgcaaaggaatagtaaagaaagcgtgtttgagatccagaacagaataatgggtagtagagggagatattgaggataggagagtatatgggtttggcaccacaggatgggtaggcaaaacaatttggttgataaggctcagatcctgaactaacctgtaaggcttgtctggttcgaggacaggtgaaatgggggaattgtaagtagagtttataggctttaaaaggccatgctgtagcaggcgagtgataacaggctttaatctttttaaagcatgctgtgggatgggatattggcattgagcggggtaagggtgattaggttttaatgagatggtaaggggtccatgatcggtcaccaaggagggagtagaggtatattatacttgtgggttaaggtggggggatacaagaggaggacgcaaaggaggctttggattgggaagaagggcagcaatgagatgtagccttagtccaggaatagtcagggaagcagatagtttagttaaagtgtctcggcctaataagggaactgggcaggtggggataactaaaaaggagtgcttaaaagagtattgtctaagttggcaccagatttgaggagttttaagaggtttagaagcttgactgtcaatacctacaacagttatggaggcaagagaaacaggcccttgaaaagaaggtaatgtggagtgggtagcctccgtattaagaaggggacggacttactctccactgtgagagttacttagagcgtctgtgatggtcctgtaagcttctgaggcaatcaggcggtgtcagtcttcagctgctaagccgagaagatctgggaaggagtcagagagccttcagccagagttccaggggctctgggagtggctgccaggtgagttgaacagtccgatttccagtggggtcctgcacagatgggacacggcttaggaggaatcctgggctgcgggcattccttggcctggtggccagatttctggcacttgtagcaagctcctgggggaggcagttctggatgtacacctagccactgcggttcaggcgtttggaagttcttgtgtgctggagatgtggctggagtttgtctcacagtggaggcaaggaattgcaactcggaaatatgttgctacttggctgcctctactctattattgtacaccttgaaggcaaggttaagtaagtcctgttgtggggtttgagggccggaatttaatttttggagctttatttaatgttgggagcagattgggtaatacaatgtatattgagaataagacggccttttgaccttttaggatctagggctataaagcatctcagggttgctgccgaacgagccatgaactgggctgggtttttatatttgatgaagaagagcctaaacgctctctgatttgggataaagaaaaaggagcattaaccttgactatgcctttagctccagccacttttctaagagtaaattgctgggcaggttggggagggctagtcacggaacgaaactataagctggactgggtgtgaggaggggaggggataaaaggattatagggtggaggagcggaggctgaggaagaattgagacctcgcttggcctggtgaggggagaggtcagatgggtctgtagaaaaggaagattagacagactcagcgacgcttggggttgggactggggacaggtgggagggaaagaaggaagatttgggacgagtcacattgggaacagagactagggagggaccgatgtgtaaaagaatgcctggacatcaggcacctcagaccatttgcctattttacgacaagaattatttagatcttgtaggatggaaaaattgaaagtgccgttttccggctatttggaactactgtcgagtttgtattggggtcaagcggcattgcagaagaaaataaggcatttaggttttaggtcaggagtgagttgaagaggttttaagttcttaagaacacgggctaagggagaagaaggaggaatggaaggtggaagcttgcccatagtgaaggaggcaagcccagagaaaggagagtagagacacggagaaggggtgggggattcttaccctccagaaaagtggaaaaggggtcagggcacggaaaaaagggatggggcacagagataagaggttggggttcttgtccctcctccaggaaagtgggacttgcctcaaagggtgaaggaccaaggcaggcgtccctgcgtggtctgacacctctgaaacgtgggtgaataatcaggcgtccctgcaatgattaaacaccaagggaaggctgccttcccagtccatgaccggcgccagagttttaggtccatagataaaacgtgtctcctttgtctctaccagaaaatgaaaagaattgaaattaagagaaggcagagattgaagtgtggcatcaagattgagaggagaaaggttgaggaatagtgagggaggttggagaagagagtaaaaagaggctgcttacctgatttaaaattggtgagatgttccttgggctggtgggtctgaggacctgaggtcataggtggatctttttcacggagcaaagagcaggaggacaggggattgatctcccaagggaggtcccccgatccgagtcacagcaccaaatttcatgtgcgtccgtgtgaagagaccaccaaacaggctttgtgtgagcaataaagcttttaatcacctgggtgcaggcgggctgagtccgaaaagggagtcagcgaaggaagatggggtggggccgttttataagatttgggtaggtaaaggaaaattacagtcaaaggggggttctctggcgggcaggagtgggggtcacaaggtgctcagtaggggagcttttgagccaggatgagccaggagaaggaatttctcaagataatatcatcagttaaggcaggaacaggccattttcacttcttttgtggtggaatgtcatcagttaaggcaggaactggccatctggatgtgtacgtgcaggtcacaggggatatgatggcttagcttgggcttagaggcctgacagaaaccactgacataaagggagatgccaggaaccactgggcaccaggtggatggaaagggcccaggttggaggagggctggggagacaactggtggactgtttgggttttattgccatattctgtgtacataaaaaacaacataggccgggtgcggtggctcacgcctgtaatctcagcactttgggaggctgaagcgggcagatcacctgaggtcgggagttcaagacctcaagaccagcctgaccaacatggtgaaaccctgtctctactaaaaatacaaaattagctgggcgtggtagtgcatgcctgtaatcccagctactcgggaggctgaggcaggagaatcacttgaacccaggaggcggagaggttgtgatgaggcgagattgcaccattgcactccagcctgggcaaaaagagcgaaactccttctcaaaaaaataaaataaaaataaaataaaaaatactccacgtagagttatgcaaaaaaggaaatgttaccacagcatgaagtgtgccgcttggctcagttgtgaatagtgataacagccagaataatggtcacgcggaatactgatttaaccgaaactgtgacaaacctcatcagccgggcagggatgcgtgtggagcgagccgctggccaagtgctgccagatgccccaagtgacccagagaaatggtcatctggatttccacgctaaacatttcccgatttttaaatgctgccaagtatcttttcaaagatacacttcaggccaaacacacctgctgggggctagctgaagcagccagccccagtttgcgatcctgcccaggagggccctcaagcgcttgccccagggtcttggcagttctccggaaagtcggggccccgccggtctggcagatgcttcctagcgaacccaggggcagcgcgctgggcggaggccctccctggggagcccccggggtccccggccaacagctgtgcctgctgccacacctcccagctggacacagctctcctgtagcgaaaacaaaacccaccaagcaggtggctgcaggagcccgcgcgcaacgcgcccgctcctggccgcgcacgccccctggcggccatcgggaagcatcgccgccgcgttccttggggagagccacgcctctgggaaagctaagaactgttcacattagaagcatccacttgcacggtttttttgttgctgttttttggggggttttgttgttgttgttttgtgggtttctttttctttttgagacagagtctaactctgtcacccaggctggagtccagtggcggcacgatctcggctcactgcaacctccaactcccaggttcaagcaattctcttgcctcagcctacccagtagctgggattacaggcgcccaccgccacgcccggctaatttttgtattttagtagagacggggtttcaccatgttggccaggctggtctcaaactcctgacctcatgatccgcccacctcggcctctcaaagtgctaggattacaggcgtgagccaccgcgcccggcctgcacgttttatttgaacctcaggtacacagattaatcatcatcctgagttcataacactcttacactctaatcatggtccatgcatggcctccttcctccctccttccctattttttgtttatagtcagcactgaagctagtcgtgacaacctgcattcaactgtaacaatatgcttcttcagttcatcaccctcccatctttttcctcccaaggtaacctcccaaatcccccattgatcacgggcttgcatttcttgtaatcttggtagtttataattaaatggaaaagataccacactgtatgtaatctttcaggactttattcacttaccattatgcaacatgttacatcctcttggcctcacctatcccttgatccagccaccactgcagtgctagccctgcaaggcctacgaccatgtcatgccagcataacctgatagctgtgatttgggccttcaactgtcaccttggcgctttcctgtggacactgccatgggacctgctcagcggccacacagtgcaacttgcaagtgctgcaggggaattcactccctgtgaggtaacactgaccaatgggacacaggaaccagtgcgtgcattcttcctcctcctctcctggaccagaccaccctgaggcacattttacacagcttctcagaggacagtcctgtggaatcgagcaaccaatcacacagtggtggctaactcagtaatatcctcatattggctcactctccttccctggttcactcatgatgatggctcagcgggccacgtggatacaagctgaaaatgtgtgctggctgcactaatagtgttatttcaggggtagccttgaaagacagcagtgaaaggaaacactcccaatgggcaaagctctgggcagtgcatctgatcatccgctggaaagaaaatatacagactcagggagtggtgaacggcttggctgattggccaggggactggaaagagaaagaccgcaaggccccagagggatgagtgagacaaaacgagtcttcagccactaaacttctcaaacaagcaagtcatttgaacaagaggtggatttcttacaaaatgcaaactctgagtaatgaggccactgcatatcagaaaaaaagcccagaaaaaaacctgcataatacatgttatgactgaaagccaggtatggatggaatgaaagggacaggcagagctggactagctagggggctgtaagggtgctcagaacagcagatgacctgatacaaaacctggagtggatgtcacagttcctgtggagcaaagatctaagtctcagctgatacaactcagtctggggcaaacgacagcagagggacaagacttagatgtggggttgcatccccagattcattcctacccaggaggaagtcccaaatattcctaaacttactacatacttgctgtggttttgtgaggtggtgtgttgtgtgtgtgtgtgtgtctgtgtgtgtgtgtgtttgcctggattgtgcttctcttttgcaagaacctgttcactggatacatttattgtgacccctgttggtgactcatatcaggagcagtcagatgcatgcccaagaatggtgtttactcataaagcttgccaagcataacatttgaaacaatgcctctttctgggagaagaaaaagtatttggtcttctcacacaggttttataccaacagaggtgctatacagcgctttctttttttgagatggagttccgcttttattgcccagctggagtgcaatggcgtgatctcagctcaccacaacctccgcctcccaggttcaaacgattctcctgcctcagcctcccgagtagctgggattacagacatgagccaccacacctggctaatttttttgtatttttactagagacagggtttctccatgttggtcaggctggtcttgaactaccgacctcaggtgacccacctgcttcagcgtcccaaaggagccaccgtgcccagcctatacagagctttctttagctgaacatccctgtctgtcgaatggatgctgggaactctactgtggattagggaagcttcaaaaagagtgtggccatcttttgtttcaattgtgctgacataataaaaatgaatgaatgttttgctgccatcctacctggtacttggtttgcaacctagggtattgctaatgcattattttagatctccctgtggggaatgtcagtttgctttcacgagcacagcatatagcacacttttattgccctgaatttcccagtgatgtggcatcagtgggttggacaaacccagcacagtgtgaactgctggtgtatgggcaggcatttccatcatgtctgcacaaagaagactgctttcagggcgttacatgccacccaagcaccactgacgaaagacaggtgggccctgagcaaggacaaaacccaggcgctctgcctttcaagtggtcatcttgggggctgtgtcacagctcaaatagatatttcacaattaaataaggaaaactttgtaatagccaccaactacaaaagaagaagaaggaggaggaggaggaagaggaagaggaagaagaagaagaagaagatagaagaaggacaaggaggagaggaggagaggagggggagggggaggaggaggagaaaagaagaaaaaagaaagaagaagaagaagaaaagtggccctacagcaaaattggccgctggatggtacatcccaaacctaagaatattcctacagcttccatcccccaagtcatcagacatgtggccacatttgcccaagagcctgaacaacaaagaacctaagaatcagcccagacagcagtaacagaagccttgccctagagcctttatttcctttgggtcaaggaactacaggggtctgggactaactgcacagttgattagagcctttggcaaaccagacttctctggttcttcttctagactttgaccttttgaacttgaggacttcttcctgctgctgagaaacaacggccagcatcactgagccctgcctacgcaaaacagtcttcaacttgacattctcatcctgcaattctgaactaagtttcacaaatgggtgggacaagctccagaacatcccatcacgagaagaaaatggatcttccaattaagggccaaacccagctcctcagcctttagccatcttcagggtgggtcaaacaggtggtggcccacccaggagacagaaatagtgtctttcctactgttttacaaaaactgctggttttatgaagatgccacctatgaaacaggccacctgacaagaaagcatcactgaagaaagagcccacccacctctgagcaagcagggcctttggaatgctacagccatctagtgatggcgcaagggtgatggcccacagctttgggcactctgtgcaatgggctgaactccagaagggatttctggccacagagagtactgccctaagattaaacatgccacatgggctgtcacgaatggcccatctgtatggtcagatctttgggccaaccaggactggaccagaaaagacataccgaatattggatggcccctaccttggggacatgtaactatttaattacaaactcagtatctatctatatggttatatgaagcaaacacatctagtgaaaagcatttaaagtgaaaaagtcaaacatatgtggccatcacctccactacagaccaatcaacctgtgctcaaatccaccatatgcatggaaccaccataaaggattgagatgcccagtgatcaattatggaggccattgttttttgtttgtttttttgagacggagtctcgctttgtcacccaggctggagtgtagtggtgcaacctcagctcactgcaaggtccgcctcccggggtcatgccattctcctgcctcagcctcctgagtaactggactacaggcgcccgtatcacacccagctaattttttgtatttttttttttttttagtagagacagggttacaccgtgttcaccaggatggttttgatctcctgacctcgtgatctgcccacctcggcctcccaaagtgctgggcttacaggcgtgagccaccgcacctggccggaggccaggtttaactgcaaagactatattatttgccagctataccagacccttcaatgctgacttccacagggacagctggtccaccttcatctacttacaagctgcacaagctgatgataatcacctctgcttacccgagctcccttcaatggataaatagatgaatggttcattttgttcagatctctgtggatagactaaaacttggatactctgtatcaggtgttctatggccaccttcctctgcctgctatgtacttatgataacaaaatggcaactcgtgggtccagaaaaaggacaacttgagtcatccctaagacaggatgacagatcccaactgatctggtataaatgtcttgaccctagaagtgcatggaggccaaggggaagtgaatcactctctctttttctattacaggcatgaacaacagtcccaaatgtccttctacgactcttctagttctcatgttgttaaatatgtcacccctggcccagcccagctgtagaaccccaagggtcaggggttaagacaaatttggatggcatggaggtttgtttcctccctcattttagtagcttgttggagagatggctcaaaaggtccatatcagcgcagtgcactaacatactgagtctagcccctgaacctttgaagagcccttttttgaataaggccacttactataacagggactttcattcttataaaattgcataatcactgttgccccctccaacttccctataaacatgtagagcaccatggggcaggtccctctctgcatgtagtctctttatgtccagcataaattgtgggataatgaaagcttggggaaccatgcgtactcaacattttttttttttttttttttttttttgagacaaggtctcacaccgtcacccaggctggagtgcagtggcatgatctcggctcattgcagcctcaaactcccaggctcaggtgatcctcccacctcagtctcccaagtagcaaggtctataggcgcatgccaccatacctggctaatttttaaacattttttgtagagacagggttttgccatgctgcctaggctgcatactcaacttctaatctgctcctttcccccagcatattaattttatctgtaccacgaagcacagtgtcatattaagctagacagctttccctgtcagtagagaatttctgtatttcactgtgtgaacatattcccttgttcagtaaaaatattctttaatcagagaatgctcattgatggcaggagcgactgctcttgattttgagggcacaagttcaaggaaatagatgggtgggatataaggaataagtgcctgctgaagaatggccccatcctccatccctccctttaccatgcccttcgccccctcactctgtagtacctcctccgtctgcccctgggcttgggaatgctaatgaatgtgataaaagtagctagttttttgtatctttgatagagatggggtttcgccatattgcccaggctggtctcaaactcctgacttcaagtgatctgcccaccttggcctcccaaagtgctgggattacaggcgtgagtcaccgtgcctggacccaagggtcatttaaaacttcagggtctccatccatgccacctacccacagaggctggctttattaacagctggtttctttctctgttgcccacataaacctgagatttaacttgacttaagaggattccaaggggaaagcaatgggttgacatgggtttgtccagtgccaacagcaggtcccattctgcttctagtggaacaatctttctgggcattttaaatgctctgacttcagatgagagaaggagggcaacaggtggctaggcaaggatccagaggctataccacgtgcagaggtgattaagtacctgaggatcaaataaaaagggctcagccactggaaacctagagtcacactcccaaatgacaaaatggaaccaatatgaggaggaagactccgtaaatccaacaaacaggagaattagcaccaaaagaacttaagatcttaacagaatggtttcaaagaaaatgtagtatatgaagtcaaaagctcaatggacttgctaaatagcaaattagttaaaattcaatgaataagttaaaaacagcttaagaaaagaattagcgtttgaggctgccatgagcctcaaacatccagccttttatctctctgtagcataaagagataaaaaaagtagaaaaaattataggaaggttaaatattggaggactgaatgagaaagtcccacatacatctcataaggaatctagaacaagagagaaaataagaaaactaatttcaaaatgaaaatagatgagaattttccagaaattcaatttcattcctcaaattaaagaagcacaacacatccccagcaagttaaataaaaataaatccacagacatctccagtgaaactcaataccaaattcaaagatacaatcttaaaagaaccaaagattacctagtatgaatgcagactgacatcatgttttttgcaacatcaggggccagatgacaatggaataaagtaatatctttgaagtaatgagaaaaaatatcaatctagaattctatacccaccttagctatttttaagagtaagggtaaaataaaatttcactcttgcagaaaggacacccaactctagagttagaaaacagtaaccaaaaataaggtgggactcaaagactaaaatatgttggtaaatctaaatcagcaatgactgcataaaacaacattaatagttaacttaggaagttgttaagataaatgtaaaatactaggcaataacaacatagtacatgagaagaattgatggccattaattcttttttttttttttttttttgagatggagtctcgctctatcgcccaggctggagtgcagaggcactatctcggctcactgcaagctccatctcccgggttcacgccattctcctggatgaccattaattctaatgtcttagtatcattgaggacatgagtaggagttctgattaatattacaaatctttataaaatcaaatatgcatgctaaaaatttgatgcatattcctagattctgaggaattctagcaaagtggcaggaatgacagaattataaagttgctattttgcaactgctaacaaagtaactgatttaggcaaagatcaatggatgaaaccttttagctaaaaagttgatgggaaacttcacagtgagtggggaacacatggtcagtgcctgaacccactaagtgtgcactgaatgtggtattaccagagaatacagcaccacctacaaaaaaaaaaaaaaaaaaaaaagtttaatctgaatttaagcatgcctttagggctttcagtttacagaaaatactggaaataaaggaataagttaaataacataacagaaattaataaatccaaaatgtgagatatctgacagaaatccacagacaaactagtagaggtgtgtagagtattaggaatgcaattgatttttgattattgatcttacattcagcaaacttgctgacgtattctgttacttctactagtaatatgctagtatgcatatcagaatatgtaatttgctaatcagaatatgtaatttcttataaatatcccattctaggtaactataaaaataagtatctaggataaatctgactaaagatatgtaagacctttatgaaaacaaaagaaaattactgaaaaacaataaaagacctaaatcaatggagattctatgttcatgaatatgaagttcaaccagtaagatgccatttcccccaaaattaatcttccaattcaatgcaattccaagaaaaaagcaagagataggtgaggtctatcgctacaaaaaatttttaaaaggtggccaggtatggtggtgtgtaccagtagtcccagctacttgggagactgaggtgggaggatcgcttgagtccaggagttgaaggctgcagtgatgcagtgagctagagcacaccactgcactccagcatgggcaatagagtaagaccctgttgagagggaggggagggagagagggggcaagggagacatggagggagggagagagggaggaaggaaggaaaggacagagggagggagggaaggagggaaggaaggacaaatttggaggttggtacataaaccaaggaaatagaacagagaacccagaaataaatccatgcatttactgccaactggtatttgagaaaggtaccaagaacgtacgttggggaaaagacaatctcttaaataaatggtgctggttaatggtaacttgggaaatgaatatagtgctgggaaaactggatatccatatgcagaaaaatgaaatagacccctctctctcaccatatatgaaaatcaactcaaaatggatcgtagacctaaaagatctgaaactacaagaagaaaacgggaaatgcttcatgaaattggactgggcaaggatttttttaataagacctcaaaagcacaggcaatgaaagcaaaaatagacagatggaattacattaaaccaaaaggctgtggcccagcaaaggaaacaatcaatagagtgaagagacaatctatagaatgggagaaaagtatttgcaaaccatccatctgacaagatgttaatatccagaatatacaagaaactcaaacagctcaatagcctcccctgccaaaaaaaaaacctaatgcccaaaacacctaaatagacatttctcaaagaaaagacatacaaatggccaacagatacatgaaaaaaatgttcaatatcaccattcatcagagaaatgcaaatcaaaccacaatgaactatgagctcattggcgactattaaaaagacaaaaaatagggctaggcgccaatggcccacgccggtaatcccagcattttgggaggccaaggcaggtggatcacaaggtcaagagatcgagatcatcctggccaacattgtgaaaccccatctctactaaaaatacaaaaattagctgggcgtggtggcgcatgcctgtagtcccagctactcgggaggctgaggcaggagaatcacttgaacctgggaggtggaggttgcagtgagccaagatcacgccactgcactccagcctgggcgacagtgcaagactctgtctcaaaaaaaaaaaaaagaccaaaaatatcaaatgttggcaaggatttagagaaagggaaactcttatgcactgtgggtggaaatgtaaattagtacagccattatgaaaaacagtatggaggttcctcaaaaattaaaaacagaactaccatatatgatccagcagtctaattactgagaatacattcaatggtggtgaaatcagtatgtcaaagagctatctgcactcccatatttattgcagtgctattcacaatagccaagatacaaaatcaatccaaatgtccatctacagatgactggataaagaaaatgtggcatgtgtgtacagaaatacacgatagaatattgttcaatcataaaacaatgaaatcctgcttttttttgcagcaacatggatgaacctggaggacattatgttaagtgaaataagccaggcacagaaagacaaacaccacatgatctcattcatctgtggaatctaaaaaagttgatttcacagaatgagagagtagaataacggttaccagtgtctggggagggtagtgagtttgcaggagtggggactgggagaggttggccaatggatacaaagttacagttaggaagaataaattctggtgttctattatacagcagagtgactgtagaaatgaataatgtaggcgggccagtggtggctcacccttgtaattccaacactttgggaggatcgcttgagcccagcaattcaagaccagctggggcaacatggcaaaactcgtctctacaaaaactacaaaaattagctactcgggggcactgaggtgggaggaacgcttgaacccagacggtcaaggctgcactgtgctccagcctgggcgacaaaacaaccctgtctcaaacaacaacaatgtagtgtatatttcaagatagctagaagactttgaatgttatcactactaagaaataataaatgtttaaagtgatggatatgacaaaccctgatttgatacaatgtacacatatattgaaacatcatactgtactccataaatatgtataattgtcaattataaataaaaaattaatttaaaaaaggaatattctatacttcctaaaatgtttaaaggtttacatcttatatttagtacttgatgctactttggttttgatgtattgtgtgaatgcctcacaccatctagtttattgtttcaatgggtggccccttctctgacatacaatgttgcttctgtttaagtggatatatatgtataggtctgttgctggctttcttgggctattttttattacctatgttaataacacagacttgatcaaaccttaatttctgatagtgcaatttcaaaattgttttatgcttggcttttttttttttttaagatggggtctcactgtgtcacccactctggagtgcagtggcacaatcacagctcatttcagcctcacactcctgggagaaaatgctgttaggatcctctagcgatcctcccactttagcctccttagtggattggaccacaggtgcaggccactgcgcctggctaatttcagatctgttctttttcctcaagattgctttggcaatccagagtcttttgcacttccatatgaattttcagattattttttctatttctgagaaataaaggtcaacaaacaagtgaaaagacaatcaggttcaccagaaacaggaagaatacaaaaaaaaaaaaaaaaagaggcaccatttcagtaccagacgagcaaaaatgttaagttgaactaatattaagtgcattacaagagtggggaaaccagcacctcattcactgctgagggaaatataaactgggtctaccctttggagatccatctggaaatatttagccatgctgaaatcataacgtaccttctgacccaccagacaatttaacttctaagtagttacccaccatgtaaattctcacatgtgcacaagaagagatgttcaaatacatttgttccctgtaatgttaagatggtcaaaagctgaaaatgctgttagaatttttctatcagtaggagaataagtaaattgtgacatatccatacaatgaaataccaaacagcatttaaaatgaatgaaccagagttacaaccttgaagcaaatatggcaaaatgttataatctattaaaggtgagtgagtggagtctacaacaggtattatcctctgtgcttccagtacttgaaatatttcaggccaggcgccgtggctcatgcctgtaatcccagcactttgggaggcaaggcaggtggatcacctgaggtcaggagtttgagaccagcctgaccaacatggtgaaaccgcatctctactaaaaacacaaaaaaattagcagggtttggtggcatgcgcctgtaatcccagctactcaggaggttgaagcaggagaatcgcttgaacccgggaggcagaggttgcagtgagccaagatggcgccactgcactccagcctgaaggatagagcaagactctgtctccaaaacaaacaaacaaattcaaaaattttaaaaagtagctaaatataaaaatgttggggaaaagacaatacttctccccccaccccgttgtttttttgtttgtttgtttgtttttttgagatggagttttgcgcttgtttcccaggctggagtgcaatggcatgacctcggctcactgcaacctccgcctctggggtttgagcgattctcctgcctcagcctccaaagtagctggggttacagtcatgtgccaccacacccagctaaattttgtatttttactagagatggggtttcaccacattggcctggctggtttcgaactcctgaccttagctgatccgcctgccttggcctcccaaagtgctgggattacaggagtgagccactgcgcccagcctccccctttattatatcaatttctatgacacacattactgtacttgtagaaaaatttggccactgaattcaccaatgtacccagatgtcttatgaaataagtttttcttactgtttaagacacatttaattagattttctgcttcttgcagcttattgcatattgatacaatgctctttatcaaaacaaaactcaactctaaactctgaagaatgtacaaattccagtgagttcttgatgactataaagaccctgttattctcacacagggtggaggcaggaatttcgcaaactacacaaatagctgtagttttaccagcaccaccctaataattttgcttcacactttcccaatcattgaacagttcctaagataatgtgcctattttgtttttagcattgttagccacatctagaaatgtgacaaggagtctaaattgcttctttggaagtatttaaagccatttgtaagtcttcctctgtggttccctaaaaatgttgtttaaatgtgtattctaactttccaacaagagggacagtttatggatgggaaatggatttgtttcttttctatcctagatatatctaaaatctagtattctatataggcactcaacaagattgtgcagccaactcccacaactacagagacagcttttcatttaaacatcacacttctgtaataaacacttacaaaggtaagaacgttttaattaaatggatttatttaaaaagactataaaatctgacatcaagagagataaaaaaaaaagacccataagatttaaattgacaaatataaaatgattggctacaatgtaaaaatacatttcccagcccccaaacaaaacacaagtatagtaattataaaatttttgtactgtgagttcatttctcttataattcttgagaaccattctaagcaatctatttgtataaaatataaaatttatcataactgttaatttaaaaattattttaaatttgagtttattgaatttgccatttttttgtacataacagtggtttctggtcccaagttccccttgaacttatttactacaatggtctttttactcctatttatttccttctacaatagaaaagaaaggctaaccattcatgggtcccataaaaaacaatgtgaaggaaggttctaagagtgaccaaatataccagtgaacatactatctttctgaaaaagaaagaattaagtgaccaactaagagatccacttttgcaccaatgaaacacatggaggtgaaacctcagaacaagcggagcttaagctcaatgacagtatgttttatatgacaggccagctgagaatgtatctgtcaatcctgactaagcccaatacatgggtggtgaccctgaggtagcccagatgatatgctctgaattttagataggtctaaatcacaatggtacagtctgatgtgaaactttagtctacctaccataaactcgttttctgaatcagtccttattcataattagacccaaaacccagctatttctcctctcttagatgacatgcccaataaaaacagcatccatgattggtttcattatctcccaattaagtagtggtgacaccaccactaacactagtatccaaactctgatacaaatcctaaaggtattgagtcagtaagacagagcagaagctatgttgggccatactgaccaatttctgagaaccacattagccacattcatgcaattaaaacccatctaagacacacaaatggcagatgagaaaaaaaaaaaaggatgaggtcattaaactttatcactggaaacatgattccactgtttcaaataggaaacctaccctgggagacttccaccaaagtgcagaaggacctgatgcacgggctcatcatcttaacactagagtcccaagtcaaaactctaggaggaggataagaaaggtctagtctgtgaatcacctggacagaaaggtcatatcccaagtgccctgcctatctgtgacagctgctagccaacagacaattctggttatgaagttatctcttgagaatggcttgattctcttatgccaccaacagtattagtctgggcagggttccctggatatttacttttttttttttttttttttgccaaagacaaactagagcaatgcctatgtaagaacaaggactctcaagatcctgctacacagtattcacaatcaaaagggcccaagattcaggaccacctaaagacaactgacaaaaagtgtcagagccagaggccaacctctgctagatgaagcagcagcacatgactccatttctatctgataaggagacagagaagaggcatctcgaacagatgaaaaaccaaaggctggtgtcctaaaaaaaacagattggcttcaaagaaaacactaaggaagacccacagagctgtattaattttagtaaaaataatcatatgccaacaggggaattgaaccactttctaaatcatagtatgaactcatctcttcagatacttggtaagtggtcaaagcttgtttttataattactttcactgtcttgggcaaaaagtctttcttatctttggtccttaggtgtggtatcagtttcttccatttttttatgtgttacaaaacaatcttttttttacttgacatcaacaaccaaggtgcagtataaacacgaagttgctgatattgttgcttttatacacataaaataccaacatctcccatacattttataggctatacgaaggtctcaaagaattaataaccgttatccaaaaatattataacatttaaggctgagtgaaatacagtaaagcctggtaatatatgttaaggaaaaaaacctagaccaacattttaaatattggtttcttaaatatgttaaattcccattaacagaacataatctaagcatcaaaacaaacagctaagcaaattaatttaaaaataaaacaatttctaagtagatgaatataatcacgatgtttatacagctataaagcataatttggaagctaagcctagtaaaagaatgacctgtaacagaatgacagaatcatttatcaaccgttgagctgtgtgatttaaaaacaattgttttctcctcctcccaccaaaatctccatttgagataagtttcaattattatttaaaaaaaaattttttttaacttatctggcctactttgtggtgactgacacaatattgataaaactgccttcttgaccttccccttgctctccaaaagaagtggtttaaacaattaacaaattttacaagagcttctgccagggctcaggcaccacaatgcagggtcactaccttaggtaacatctgctccccagagtctttaggcattaagtggctcagtgagggcttcagccctagtggtattttcaggttttctcagctgggactcctgtcgtttttcatacagcatagtgataaagtcaagtaggaacataaaacttgctataaatccaaacacctgaggaaaaaaaggaggaaaggttatatgagaattttggaatataatcttacatttcctacttggcttggagaatgtttcatataaacaagatgttcatgaattttatcttatacacgactactctttaatggtaaaaaaaatttttttaagtcatcaaaaaatggaaagaagttataaaagaaaaacttccagaataatggctattagtcaaagtctcacaaaatattaatgttctgccttatgtgtgcatgtttatatgtggagggctaatatatgaaagtagggttaacagataaacattaaatcctataaaatgatacaaaacaaaaatatttgcatggttagattgacccacagatgcgataaggaaaatacgtgactaggcaactcagcctaggtgaaaatgaaaaaagttattaatatcaaaacagaaattccattttgaagatactattaggttaaattacttaaataatgttccagttgtcacactgcaatgacacagtgacatgacgccactacctacttcctcttccttaaatcacttcctcaactgttctcttctaaaatacgatcatacgttctgagaattctatcaagagacagaagaccatgcgtctgcttcaaatttagcttctccactagcaaaacccttaaggatatgggggccagataagttctctgtaaaaaagagaaaattgatgtaggtgatggctaaagtctcttccaaatctaaactccctatctccacgatttttattaataacattctcttacagtctgttgcagtctcctgacctctcctcccccctctaaagaataagcattccacctcattttaccacaaagtaaactgagctccaaattcattaagtcccccagatatccccaacatatccaatctaaatttaattatcaacgcctcccaccctcccatcccccgccacaaaagccaagtctttttccctctggaatctttatttttgacttgatggcatttatccccttattttcctggcaactttcttaaatacatcaaactcagaccaaatgtcacccttgtttttgaagctgtctctgatcaccacaagtcatcttctagctcttttgttcacacacttctgaattaaaaaaaaaaaaagaacttcctcatgcatttaagtctataaaacttttcataatttaaatagttacaaaaggtaatttccagcatattataaatatcagctttttaaactacctgtcactattaaatatatccaatgaaatataaatactgggacagtctaattaaaatataaaaattttttttatagctgtaaattttttccctggaactcaatttttcctcaacttcatttcactttccccacagaattttatagtaatgtatttttatacaaataagtagccagagctttttaaaattaaaaatgagttaaaaaactcattattttattgatcaccatctcatactcctctgcaacaaaaatgtttctaaactgaaattaaccataaagccctattaaaactttgatttttctcttctattggttcatgtacccatgaataaatattgcttattgctagaatgaatcaagattcagtgttaattttatttctatgttttgtttttacacatgtaagtgctaagaaactgttgtcatatgaatagataaatatagccatgcaattctctgaactccttttgagttttctatcataaaatgcagttttaatgatgtattagctgacaactctattaattacaacttcaattttgtttttggtttttgagatggagtctcactctgtcacttacactggagtgcagtggcacaatcttggctcactgcaacctccgcctcctcggttcaagcgattttcctgcctcagcctctcgagtagctgggactacaggcgcctgccaccatgcccggctaagttttgtatttttagtagagacaagctttcactatattggccaagctggtctcaaacttctgacctcctgatccgcccgccttggcctcccaaagtgctgggattacaggcgttgacccaccacccaccacgcccggcctaacttcaattttgttaaaaacaaagtattaattggaaaccagctgacttgcaagatgatttgttgtccagttgctagtcattcaagttcacagcactgctaccagtccaaggccatgatccttaatttacaattccgaaacccaaagaactacattaactcaaggttttcatgattcacttggctcaaaattgacacaaagtaagcctatttacatggagtaagactacttacagtcttttcttatcccttttactataaatattcatatgttttacttcagatataccaatgttagattacagggtactgtcgcaggccctcaagtggtgttgtgtaatatagcatatgtacagcactacctttctaaaatccagaatattctgaatccaaaagaaaaaaattctggccccaagaatttcagagaaaaattggatctttattttcaactgtctctttgttgtactcaagggtttttttgttttacaattcagggtaatccaccataataagtgatatggcttgggtttgtgtccccacccaattctcatgtcaaattataatccccaatgttgggggtggagcctagctggaagtgacaggatcatggggcagactccccctctggcgctgttcttgtaatagtgagttactgcaagatctgcttgtttaaaagtgtgtagcacctccccactctctctattcctcctgctctggccatgtaagatgtgcctgcttccgcctcgccttctgccatgactgtaaatttcctgaggcctcccttgctatgcttcctatagagctgtcagaaccatgaggcaattaaacctcttttctttataagttacccagtgtcaggtatttctatatagcagggcaagaaggaactaatccagcaagattcaggacaagcaagttttttttctttttgaggggcaaggtaggtggcgactgtgaatgggaaggtggaaaagtgccggtgagactccttcaccagagataaattctcagacatacaagttttaaaaaagattacatatggaggtttaaaagctggaaattaatttcctcaacactatctctgcctcatactccttgaaaagtctgatgaaactttaaggatatgtataacccactgaaaactgctgtctagaccaacttttttttctattatttttttttttcttcttatagagatgaggtctcactatgttgcttgcccaggctggtcttgaactcctggcttcaagtgattctctcaccttggcctcccaaagtgctgggattacaagcctgagccacggcacccagtctcagaacaactgctattggttcatttaacaaactccattacaattttacttttccgtctccttttctagactgagtctctgaatcatttctcccatatattctccatacctagaaaacacctggcatgtaggtgtgcatttattgaactgaaagtggagaaatataaaataataaagtcaattttaccacttccattagcaataacacacggtatgtggagtaagtggattttttttaaacaaaattcagtcaaattctataggctctaggttttaaaggctatcatattgatttgcttgtaggtcttctattcaaaattacactaaaaagtaagttataagaaaaacaactctaacatgctgtataacttgtcaagtactctccaaattccatatttctaaggaaacaaaaataagcaatgttaaaaatacaaggtacttacaattgcagcaatctcagctgaagtcctgtcatgtgtggaaacaaaaatgatggatgccaacaaaaacacacatcctgttcccaaagtaatataaaaatcctatgcatacatacaaaacacaaaaggaatacaatacagttagattcatggaaatgaactttttcatttttaactttaaaaagctctggctacttacttgtttttcttgatacaacccaaacttacatacccaaacttctaacttttcaataagcctggcattcaataaataccctgtaaaaaaacagtatccacactgggctgggattattgagagaacacattacaagataaacttttaataacaacaatcccctatgccaggagaggtggcatgagcctgtagtcccagctaactgggacattttttattatccagtccaaaaaaagaaaaaaaaaaaaaaacagtcccggaaaagatctcgtgtgtatctcgtgcaagtgtttgtgtgtgtcctctttttctctgggacatattaaaattatctaagccaaagcatttattacaattccatcttacttccagcaaaaaagcatttttctttcctttcaaagtattttatggtaggatgacatctctgagagcactccaatgctttgaaagcactttctaaaagaaagaattttaaaaaccacccgttattaaatagaagtatgccaatagtgtgttttttagacactgaagctttctggaataacacattgccttcaactgttccaagtgggtaatctacagtgagcttatatgatgagtttatctactacataaaagcttccatatcttatcataatgcagcttacaatcatgagatgtttcatgggtttccaagtgctctctcaggcattacctcacaaggctctcatatgccaactgaaaacagtaatgacatatatacttgattcagaaagggaaacttggtaaaatgatagccactccaaagggttttaagtctgatactttttgagttttctgaactgcaaactccactaaacctaatatcaataaaactggccaggcacggtggctcacgcctgtaatctcagcactttgggaggccgagacgggcagatcacgaggtcaggagttcgagaccagcctgaccaacatggtgaaaccctgtctctactaaaaatacaaaaaaaattagctgggcgtggtggtgggtgcctgtagtcccagctattctggaggctgaggcaagagaatcacttgaacccaggaggcagaggttgcagtgagccaaggtcacaccactgcattccagcctgggcgacagagcgagactccatctcaaaaaaaaaaaaaaaaaaaaatcaataaaactatttaacacagaattcctaaattgtcaatcattcacttaacatttatataaaatgtaagaggttttcttgccgggcacggtggttcacacctgtaatcccagcactttgggaggccaagacaggtggatcacctgaggtcaggagttcaagaacaccatggccaacatggtgaaaccctatctctattaaaaatacaaaaattagctgggtgtggtggcaggcacctgtaatcccagctacttgggaggctgaggcaggagaatcacttaaacccaggaagcacaaggttgcagtgagccgagatcgtgccattgcactccagcctgggtgacaagaacgaaactctgtctcaaaaaagaaaaaaaaaaaaagaggttttctctgcttctaaaaggtgtttccctgtagtactttattttttaatccttttgattatttcaaatttattacatataaatataaaattctatttactaatatttggaatacattcaagttaattgaaacaagacaatcatttttagaccataatgtagtgttcaataaacgggttctagagccagtctacctgagttcaaatctgagctataccactaataaatgtaaacgtcccaaaaatgttggctactgttgttcttaatagactccgactgcaatagcatgggatagaagacattctctcttaaaaaatattattcctttgggaggccgaggtgggcggatcacctgaggtcaggagtttgagaccagcctggccaatatggcgaaaccccatctctactaaaagtacaaaaatttgctgggtgtggtggcacacgcctgtaatcccagctattcgggaggctgaagcaggagaatcgtttgaacccgggaggtggaagatgcagtgagctgctattgcgccactgcactccagcctgggtaacacagcaagacttctcaaaaaaaaaaaaaaagttattcttctttaggcaccaccagtaccacacactcaaaacacattcctctaaaacagaaaacctctcttgcatgaaaaaatatttaaaacctaagtgtattaatatgcagacagtaaaaagtgattttgaaaccctgcaaacaaacatgaaatccttatattaggtaaaaagtagaatatatgttctatgattacaaatattttaaattttaaaactatgaatggaataaaaagacttgaaaggaatacagcaaaataatacaaaagctattttaggatggactaatttttcttttttctcagtatttttaaaccagtatttactctaaaatgactttttaaatgctcaagtttgatataataaaggttttactttttttacgttacaccattatactacactggacaatattataataccatttcttgtcaaaatgatcagtgtgctttaaacactacagatgcagcattaaaataaaaactaaacatttctaaaaatatttttatggtgatattgtttcactgttaagaaatgacaaaatgatttcaatctgtaatttttttaatataaatttttccagccagaatttggaatatatacatttttttttacacattcaaactataaatcaaccagctcagacacttgagaacttttccctagtccaaatcttatggcatattaatctgtaaaaaagaaaaatgtccaaagactacaaatataattaacaaaaattctaaggattatctgtatcctcttaatatatatttcataaaacaaatgagtcctgttgtcattgtcatagaaattcctatagtgatggcattagccatgacagcacctcaagatggtagggcattggttctaacaggattctgctcctagcaaactaacacaggaacaaatgcattcttaattcacttatagacaacttttcataataccattaaagcaaaatataggaagaattacatgttgttttattttccccaatcactgaagctttaagctttaaatgttgttttattttaaagctccagaaatatttcacattagttcattactctatctccaatgtctagcatataaatgcctggcatataataaaggcacacaattaataattgtagaaccaatgagtgacactcaaaagtgagaaatcagaagtgacaaaatcctaggcttttttaagtctaatgtgaattacattaaaccaccaataactgtaaactattggcagtgtctgtcactctcattctaatctcactttccctctctaccatccccttggtaggaaaaaatgaggtgcttagaagcagagcgagttggaacaagggatactgtcttttcatgttgctgagttttgaaaacattactgctttgaacaataaaattatgccagattacaaaacagctattaatacagggatgatattttctcatgcttaccgatgattttacttttgtggtatcaactctctcataaaatggagtgcaatacacaatcagtataaggagactcagaagaaaggcactgcagcttacaaactcaaaaaaataaagtcctccacataaagtacattgtgatacaacttcttcacagatgaaggccagcagagacagcaactacaaatgaagcaaaacattttacttaagtgttttttcagagaatctacagtatttagaaagctgtttctgaataatacgtttactcaaatatttacaatgaggagactatggcaaacaagattaatgaataaaccttatctacacagaacttacagtttggccgccttgaaggaaatacaggtaaataaagaattaattaacctatcgtgtactaatgccagcaaaggggaaatatataatattgttataaaagcacacaggagagacgctcaactgcggggtcaggaaaggcttcctgaaggagaaagctgagacctgaagaacagagtcagtttgggggatgaaagattaaggaaagaaattcccagcagagaagcagtatatagaaaggccagaaatgagggagcatggcacctgccctctgacccaacatacagacaacacacaccccgacctccaacttaactgtcaaagtgagtcaaatcaacatggcttaagtatagagtttaagggaagagaatggcagcacaaaaattagtatatgaggctagagaggtaagctgaggccagatctaaatgtcctcgttaattaagagtctggattttaaagtaaaggttgacaatgatcaggtgtatgctttcagtagttctcactggctacaatatggagaagggaccagaggtaaggcaaaccttggggcggacatccaactgggaagctgatgtaggaaatcagggcaaataatagcgactagggagcagcaatagagaagagtggcaatcactgagagatgcagcagaagctcttatcagacaagatgcaaaagctcatatcagacaagatgcatacaaataatatggaacacaagataacacatgtgtaccttaaacattttaacttaaaaacgcacatttattaacaatctgctgaagtgagtattttctttatgggtctactgacgaattccacatgttttctgcattaatcactttcatcatctatggactactacttccagactgatgttatctgaagtgaagtgagatcttaaacacttgagaaacagagttcagaatctttctagagtcagactattttaccagccttttacagttgccttgctcttccttaattccatggcagataaatcttgtagtaagttatctttcagtctttcca

SEQ ID NO: 3415 - DNA, 1347 bp, Homo sapiens
cgcatctacgagggccgggactgccgctacctttctggaaggcgccggccggccagtcaccggagggatcccgccagaggcggctccgcgtctccagcagcggggcagggacccgggcgccccgccctcgccagcgcccgcccccgcccgcccccggcccgccctctgtatctggcccctgggcagctgcccggggaggcggccagcgagctggggccgcgcaatgtcgcacggagccgggctcgtccgcaccacgtgcagcagcggcagcgcgctcggacccggggccggcgcggcccagcccagcgcgagccccttggaggggctgctggacctcagctacccccgcacccacgcggccctgctgaaagtggcgcaaatggtcaccctgctgattgccttcatctgtgtgcggagctccctgtggaccaactacagcgcctacagctactttgaagtggtcaccatttgcgacttgataatgatcctcgccttttacctggtccacctcttccgcttctaccgcgtgctcacctgtatcagctggcccctgtcggaacttctgcactatttaatcggtaccctgctcctcctcatcgcctccattgtggcagcttccaagagttacaaccagagcggactggtagccggagcgatctttggtttcatggccaccttcctctgcatggcaagcatatggctgtcctataagatctcgtgtgtaacccagtccacagatgcagccgtctgatgaggccacaacccctaggcccctcaggagctttgcagagaggaggacgtgtactccaggcgaggcctctggacctgtgttcctgtgccaaagtcctgtcaggctggtgggcaccaggaaaggcctgcaccctcttcctgctctcccaggaagccagctccctgagctcctgagccagccggaaactcttcctccagccttccggggagaacatccctcccattctgggaaaggaaagcagcctccagggaaatgttttctgccttcctgcttctagaaccacctcaggtactgatgaaccccacttagcacagctgaaggggtttgtgaatactcccgcctaaatcccttctacttcactcctcaggggagtgaagtgccttaagaaacaaagccctgtcctaatttatctagcttgtcagtccggtcttagagataccctctttcctgaagtgaggcgtgcctgtagaaacactatgtggtcagcctgtccccaaggagatcttgtgtctcctctccatctctgcctttgttaccagtgtgcatgtgtttgtgtgttttttaataaaatattgactcggccagttgcacaagga

SEQ ID NO: 3416 - protein, 173 aa, Homo sapiens
MSHGAGLVRTTCSSGSALGPGAGAAQPSDLEGLLDLSYPRTHAALLKVAQMVTLLIAFICVRSSLWTNYSAYSYFEVVTICDLIMILAFYLVHLFRFYRVLTCISWPLSELLHYLIGTLLLLIASIVAASKSYNQSGLVAGAIFGFMATFLCMASIWLSYKISCVTQSTDAAV

SEQ ID NO: 3417 - DNA, 402 bp, Homo sapiens
atgtcgcacggagccgggctcgtccgcaccacgtgcagcagcggcagcgcgctcggacccggggccggcgcggcccagcccagcgcgagccccttggaggggctgctggacctcagctacccccgcacccacgcggccctgctgaaagtggcgcaaatggggtccgggagcggacgcgccgggcgtctggacccggccggagcccagggagcatcgcgcagcgggcggggcaccgcgtcgctaaagttcgcggcaggcttcctccgggaaagttgctgccgcagcccccgcgctggagctcagtccccagagccgccccggcccttgctcccgcggacccaggtcgccagggtcgcaagtttctccggccacccccctgcgaagcctgacccgcctactgac

SEQ ID NO: 3418 - protein, 132 aa, Homo sapiens
MSHGAGLVRTTCSSGSALGPGAGAAQPSDLEGLLDLSYPRTHAALLKVAQMGSGSGRAGRLDPAGAQGASRSGRGTASLKFAAGFLRESCCRSPRAGAQSPEPPRPLLPRTQVARVASFSGHPPAKPDPPTD

SEQ ID NO: 3419 - DNA, 1368 bp, Homo sapiens
cgcatctacgagggccgggactgccgctacctttctggaaggcgccggccggccagtcaccggagggatcccgccagaggcggctccgcgtctccagcagcggggcagggacccgggcgccccgccctcgccagcgcccgcccccgcccgcccccggcccgccctctgtatctggcccctgggcagctgcccggggaggcggccagcgagctggggccgcgcaatgtcgcacggagccgggctcgtccgcaccacgtgcagcagcggcagcgcgctcggacccggggccggcgcggcccagcccagcgcgagccccttggaggggctgctggacctcagctacccccgcacccacgcggccctgctgaaagtggcgcaaatggtcaccctgctgattgccttcatctgtgtgcggagctccctgtggaccaactacagcgcctacagctactttgaagtggtcaccatttgcgacttgataatgatcctcgccttttacctggtccacctcttccgcttctaccgcgtgctcacctgtatcagctggcccctgtcggaacttctgcactatttaatcggtaccctgctcctcctcatcgcctccattgtggcagcttccaagagttacaaccagagcggactggtagccggagcgatctttggtttcatggccaccttcctctgcatggcaagcatatggctgtcctataagatctcgtgtgtaacccagtccacagatgcagccgtctgatgaggccacaacccctaggcccctcaggagctttgcagagaggaggacgtgtactccaggcgaggcctctggacctgtgttcctgtgccaaagtcctgtcaggctggtgggcaccaggaaaggcctgcaccctcttcctgctctcccaggaagccagctccctgagctcctgagccagccggaaactcttcctccagccttccggggagaacatccctcccattctgggaaaggaaagcagcctccagggaaatgttttctgccttcctgcttctagaaccacctcagacaaactagagcaatgcctatgtaagaacaaggactctcaagatcctgctacacagtattcacaatcaaaagggcccaagattcaggaccacctaaagacaactgacaaaaagtgtcagagccagaggccaacctctgctagatgaagcagcagcacatgactccatttctatctgataaggagacagagaagaggcatctcgaacagatgaaaaaccaaaggctggtgtcctaaaaaaaacagattggcttcaaagaaaacactaaggaagacccacagagctgtattaattttagtaaaaataatcatatgccaacaggggaattga

SEQ ID NO: 3420 - protein, 173 aa, Homo sapiens; identical to SEQ ID NO: 3416

SEQ ID NO: 3421 - DNA, 1906 bp, Homo sapiens
cagctgcccggggaggcggccagcgagctggggccgcgcaatgtcgcacggagccgggctcgtccgcaccacgtgcagcagcggcagcgcgctcggacccggggccggcgcggcccagcccagcgcgagccccttggaggggctgctggacctcagctacccccgcacccacgcggccctgctgaaagtggcgcaaatggtaagtgagcgcggggcgcgaggccgaggttctacagggcgtcccgggaaagcaggggtccgggagcggacgcgccgggcgtctggacccggccggagcccagggagcatcgcgcagcgggcggggcaccgcgtcgctaaagttcgcggcaggcttcctccgggaaagttgctgccgcagcccccgcgctggagctcagtccccagagccgccccggcccttgctcccgcggacccaggtcgccagggtcgcaagtttctccggccacccccctgcgaagcctgacccgcctactgactgaaaccacgggcaaagttccttttcgtctttcttcctcttctctgggccgcgccgcttcgaacccgagccgggggtggaagagtcgcccaggcggcggcgctgagggagcgaaacccgacctcttccccgtccacggcctcctctttcctccgaacccagcgcggcagggcttccctgctctgtgtgcagtttcgctcgaaggaggaggtcagagggtcttgcgttccatagtggggaaaaagaactgggaccgttgagacggccgtcctggtcccctgcgccctcaagttccgagggagggcccgggtctcagggggctctggagggcagggggtcagttgggaaaggcctgttgtcaggggctggtactcatgtaggggagccagactgttgaatgggagtcacccgtggagccaggcaggatgagtgtctgggcttggattgtgaccaactcagcacaagggcctcctaccagggcagacgttgcctggccgattctcttgttccccactcttttcttttctcccctcccgtttttttcttctttaaaagtttgtaatctgaaacaacttttccgtttgtatgatgtgttttgaaactgggttgggctgtttgtgagtctccaccattgtaatgtttgcaccaagaacggtggggaggggagcggtaagtttcaaaaagaggtgtggggaaaggagtgtggggctggacaaggtcacacacccagaagctggggcctgctaaggtggcctggccccagggggttgggcacaggacgtctgtgcatctatagcactgccattccagacactgagtgtgcatgaggtggccctcatgtcttgcttgggccagacctaaagagaaggggcgctgagttcctgcctccctaagaacggtgtctagatagaccaaaaactaggaagagccatttcagcaacgtacaaaaaaatctggtgctgagcattgttgggtttgagcagggcattttttggcccaggctaagagatttgatcagccaaatagaagagaccagcccatctcaccatccttaaaagatgggctggggtgagacatatcctacctgagcattggaagggatgagtttggtagacagagaatgggatcagaagcctccatcttggcccctgagtttgctggacaaagatattgtgggatgaaaagtcttcttgttggtctatgagtttggtacacaaacataatggagatgaaacctcggcaacatagcgagaccccatctctacaaaaaaaattttaaaaccttgtgtggttggcatgggcctctagtcccagttacttgggaggctgaggtgagaggattgattgaactgagaaggtcagtgaactgtgccactgcactagtctgcgtgacggagggaggcctgtctc

SEQ ID NO: 3422 - protein, 139 aa, Homo sapiens
MSHGAGLVRTTCSSGSALGPGAGAAQPSDLEGLLDLSYPRTHAALLKVAQMVSGRRGSTGRPGKAGVRERTRRASGPGRSPGSIAQRAGHRVAKVRGRLPPGKLLPQPPRWSSVPRAAPAPADPGRQGRKFLRPPPCEA

SEQ ID NO: 3423 - DNA, 234 bp, Homo sapiens
atgtcgcacggagccgggctcgtccgcaccacgtgcagcagcggcagcgcgctcggacccggggccggcgcggcccagcccagcgcgagccccttggaggggctgctggacctcagctacccccgcacccacgcggccctgctgaaagtggcgcaaatgcagacatttataactgccacattcatctccatttgtgcagaatcagatgactgtgacaaagttcttgccctcaag

SEQ ID NO: 3424 - protein, 76 aa, Homo sapiens
MSHGAGLVRTTCSSGSALGPGAGAAQPSDLEGLLDLSYPRTHAALLKVAQMQTFITATFISICAESDDCDKVLALK
